(19) United States
(12) Patent Application Publication
(10) Pub. No.: US 2024/0116985 A1
(43) Pub. Date: Apr. 11, 2024

(54) STAPLED PEPTIDES AND METHODS THEREOF

(71) Applicant: FOG PHARMACEUTICALS, INC., Cambridge, MA (US)

(72) Inventors: Brian Halbert White, Malden, MA (US); Yaguang Si, Arlington, MA (US); Martin Robert Tremblay, Melrose, MA (US); Deborah Gail Conrady, Arlington, MA (US); Yue-Mei Zhang, Wellesley, MA (US); Ivan Tucker Jewett, Boston, MA (US); Lorenzo Josue Alfaro-Lopez, Belmont, MA (US); Sarah Isabelle Cappucci, Manchester, NH (US); Zhi Li, Braintree, MA (US); John Hanney McGee, Somerville, MA (US)

(21) Appl. No.: 18/017,024

(22) PCT Filed: Jul. 22, 2021
(86) PCT No.: PCT/US21/42856

§ 371 Date: Jan. 19, 2023

Related U.S. Application Data
(60) Provisional application No. 63/208,494, filed on Jun. 8, 2021.
(60) Provisional application No. 63/055,308, filed on Jul. 22, 2020.

(51) Int. Cl. C07K 7/08; A61K 45/06; A61P 35/00; A61K 38/00

(52) U.S. Cl. CPC C07K 7/08; A61K 45/06; A61P 35/00; A61K 38/00

(57) ABSTRACT

Among other things, the present disclosure provides various agents. In some embodiments, provided agents can bind to beta-catenin. In some embodiments, the present disclosure provides technologies for modulating beta-catenin functions. In some embodiments, the present disclosure provides technologies for preventing and/or treating conditions, disorders or diseases associated with beta-catenin. In some embodiments, the present disclosure provides designed amino acids which can provide improved properties and/or activities. In some embodiments, the present disclosure provides agents comprising such amino acids.

### CROSS-REFERENCE TO RELATED APPLICATIONS

[0001] This application is a National Stage Entry of International Application No. PCT/US21/42856, filed Jul. 22, 2021, which claims priority to United States Provisional Application Nos. 63/055,308, filed Jul. 22, 2020, and 63/208,494, filed Jun. 8, 2021, the entirety of each of which is incorporated herein by reference.

### SEQUENCE LISTING

[0002] The instant application contains a Sequence Listing which has been submitted electronically in ASCII format and is hereby incorporated by reference in its entirety. Said ASCII copy, created on Jul. 20, 2023, is named SL.txt and is 1,896,321 bytes in size.

### BACKGROUND

[0003] Stapled peptides are useful for various applications. For example, as biologically active agents, they can be utilized to modulate various biological functions.

### SUMMARY

[0004] Among other things, the present disclosure provides powerful technologies (e.g., agents (e.g., those that are or comprise peptides, in many embodiments, stapled peptides), compositions, methods, etc.) for modulating various biological functions. In some embodiments, provided technologies comprise designed structural features, e.g., novel amino acid residues, that can provide significantly improved properties and/or activities compared to comparable reference technologies that do not contain such designed structural features. In some embodiments, the present disclosure provides designed amino acids as described herein, whose incorporation into peptide agents, including stapled peptides, can provide significantly improved properties and/or activities such as improved lipophilicity and/or delivery into cells compared to reference amino acids (e.g., Asp). In some embodiments, the present disclosure provides technologies including peptides comprising such designed amino acid residues. In some embodiments, the present disclosure provides stapled peptides comprise such designed amino acid residues.

[0005] In some embodiments, the present disclosure provides technologies for modulating one or more functions of beta-catenin. Particularly, in some embodiments, the present disclosure provides various peptides, in many instances stapled peptides, that can bind to beta-catenin. Particularly, in some embodiments, the present disclosure provides various agents, e.g., peptides, in many instances stapled peptides, that can bind to beta-catenin and modulate its functions. As demonstrated herein, in some embodiments, the present disclosure binds agents that can interact with beta-catenin at a unique set of residues. In some embodiments, a binding site comprises one or more or all of the set of residues. In some embodiments, provided agents interact with one or more of a set of residues that are or correspond to the following residues of SEQ ID NO: 1: A305, Y306, G307, N308, Q309, K312, R342, K345, V346, V349, Q375, R376, Q379, N380, L382, W383, R386, N387, D413, N415, V416, T418, and C419. In some embodiments, provided agents interact with one or more of amino acid residue that are or correspond to A305, Y306, G307, N308, Q309, K312, R342, K345, V346, V349, Q375, Q379, N380, L382, W383, R386, N387, D413, N415, V416, T418, and C419 of SEQ ID NO: 1. In some embodiments, provided agents interact with one or more of amino acid residues that are or correspond to A305, Y306, G307, N308, Q309, K312, K345, V346, V349, Q379, N380, L382, W383, R386, N387, D413, N415, V416, T418, and C419 of SEQ ID NO: 1. In some embodiments, provided agents interact with one or more of amino acid residues that are or correspond to G307, K312, K345, W383, N387, D413, and N415 of SEQ ID NO: 1. In some embodiments, provided agents interact with one or more of amino acid residues that are or correspond to K312, K345, R386 and W383 of SEQ ID NO: 1. In some embodiments, provided agents interact with one or more of amino acid residues that are or correspond to K312, K345 and W383 of SEQ ID NO: 1.

[0006] As demonstrated herein, provided technologies can modulate one or more biological processes associated with beta-catenin. In some embodiments, provided agents compete with a ligand for a particular binding site (e.g., with a member of the T cell factor/lymphoid enhancer factor (TCF/LEF) family of transcription factors at the TCF site on beta-catenin). In some embodiments, provided technologies compete with TCF for interactions with beta-catenin. In some embodiments, binding of provided agents to a beta-catenin site decreases, suppresses and/or blocks binding to beta-catenin by another binding partner (e.g., a kinase). In some embodiments, binding of provided agents, e.g., at a TCF site, blocks binding of beta-catenin by a TCF/LEF family member. In some embodiments, the present disclosure provides agents that can bind to a site of beta-catenin, e.g., a TCF binding site of beta-catenin, selectively over one of more other potential binding sites of beta-catenin (e.g., for other ligands such as peptides, proteins, etc.; in some embodiments, a ligand is Axin; in some embodiments, a ligand is Bc19). In some embodiments, provided technologies modulate one or more beta-catenin functions associated with its interactions with TCF. In some embodiments, provided technologies selectively modulate beta-catenin functions, e.g., functions associated with TCF interactions. In some embodiments, provided technologies selectively modulate beta-catenin functions and do not significantly impact functions that are not associated with beta-catenin (e.g., various functions and/or processes in the Wnt pathway that are not associated with beta-catenin). In some embodiments, provided technologies are useful for inhibiting beta-catenin functions. In some embodiments, provided technologies are usefully for promoting and/or enhancing immune activities, e.g., anti-tumor adaptive immunity.

[0007] In some embodiments, provided technologies are useful for preventing or treating various conditions, disorders or diseases including cancer. In some embodiments, the present disclosure provides methods for treating or preventing a condition, disorder or disease associated with beta-catenin, comprising administering to a subject suffered therefrom or susceptible thereto an effective amount of a provided agent or a pharmaceutically acceptable salt thereof. In some embodiments, a condition, disorder or disease is associated with beta-catenin's interactions with TCF. In some embodiments, an agent, e.g., a staple peptide, is administered as a pharmaceutical composition. In some embodiments, the present disclosure provides pharmaceutical compositions which comprise or deliver a provided agent or a pharmaceutically acceptable salt thereof. In some embodiments, a pharmaceutical composition further comprises a lipid. As demonstrated herein, in some embodiments, a suitable lipid can promote delivery/activities. In some embodiments, an agent is or comprises a peptide. In some embodiments, an agent is or comprises a stapled peptides. In some embodiments, provided agents that can bind beta-catenin comprise one or more designed amino acid residues.

[0008] In some embodiments, the present disclosure provides agents that bind to a polypeptide comprising or consisting of SEQ ID NO: 1 (Uniprot ID P35222), or residues 250-450 of SEQ ID NO: 1, or residues 305-419 of SEQ ID NO: 1:

Uniprot No. P35222
(SEQ ID NO: 1)
MATQADLMELDMAMEPDRKAAVSHWQQQSYLDSGIHSGATTTAPSLSGKG
NPEEEDVDTSQVLYEWEQGFSQSFTQEQVADIDGQYAMTRAQRVRAAMFP
ETLDEGMQIPSTQFDAAHPTNVQRLAEPSQMLKHAVVNLINYQDDAELAT
RAIPELTKLLNDEDQVVVNKAAVMVHQLSKKEASRHAIMRSPQMVSAIVR
TMQNTNDVETARCTAGTLHNLSHHREGLLAIFKSGGIPALVKMLGSPVDS
VLFYAITTLHNLLLHQEGAKMAVRLAGGLQKMVALLNKTNVKFLAITTDC
LQILAYGNQESKLIILASGGPQALVNIMRTYTYEKLLWTTSRVLKVLSVC
SSNKPAIVEAGGMQALGLHLTDPSQRLVQNCLWTLRNLSDAATKQEGMEG
LLGTLVQLLGSDDINVVTCAAGILSNLTCNNYKNKMMVCQVGGIEALVRT
VLRAGDREDITEPAICALRHLTSRHQEAEMAQNAVRLHYGLPVVVKLLHP
PSHWPLIKATVGLIRNLALCPANHAPLREQGAIPRLVQLLVRAHQDTQRR
TSMGGTQQQFVEGVRMEEIVEGCTGALHILARDVHNRIVIRGINTIPLFV
QLLYSPIENIQRVAAGVLCELAQDKEAAEAIEAEGATAPLTELLHSRNEG
VATYAAAVLERMSEDKPQDYKKRLSVELTSSLERTEPMAWNETADLGLDI
GAQGEPLGYRQDDPSYRSFHSGGYGQDALGMDPMMEHEMGGHHPGADYPV
DGLPDLGHAQDLMDGLPPGDSNQLAWEDTDL

[0009] In some embodiments, provided agents specifically interact with one or more residues which are or correspond to residues 305-419 of SEQ ID NO: 1. In some embodiments, provided agents specifically bind to a motif (e.g., a portion of a polypeptide, a domain of a polypeptide, etc.) that comprise one or more residues corresponding to Ala305, Tyr306, Gly307, Asn 308, Gln309, Lys312, Arg342, Lys345, Val346, Val349, Gln375, Arg376, Gln379, Asn380, Leu382, Trp383, Arg386, Asn387, Asp413, Asn415, Val416, Thr418, and Cys419 of SEQ ID NO: 1. In some embodiments, provided agents specifically bind to a motif (e.g., a portion of a polypeptide, a domain of a polypeptide, etc.) that comprise one or more residues corresponding to Ala305, Tyr306, Gly307, Asn 308, Gln309, Lys312, Lys345, Val346, Val349, Gln375, Arg376, Gln379, Asn380, Leu382, Trp383, Arg386, Asn387, Asp413, Asn415, Val416, Thr418, and Cys419 of SEQ ID NO: 1. In some embodiments, an agent binds to a motif comprising one or more of the following residues within SEQ ID NO: 1: Ala305, Tyr306, Gly307, Asn 308, Gln309, Lys312, Arg342, Lys345, Val346, Val349, Gln375, Arg376, Gln379, Asn380, Leu382, Trp383, Arg386, Asn387, Asp413, Asn415, Val416, Thr418, and Cys419. In some embodiments, an agent specifically binds to a motif comprising one or more of the following residues within SEQ ID NO: 1: Ala305, Tyr306, Gly307, Asn 308, Gln309, Lys312, Lys345, Val346, Val349, Gln375, Arg376, Gln379, Asn380, Leu382, Trp383, Arg386, Asn387, Asp413, Asn415, Val416, Thr418, and Cys419. In some embodiments, an agent binds to a motif comprising one or more of the following residues within SEQ ID NO: 1: Ala305, Tyr306, Gly307, Asn 308, Gln309, Lys312, Arg342, Lys345, Val346, Val349, Gln 375, Gln379, Asn380, Leu382, Trp383, Arg386, Asn387, Asp413, Asn415, Val416, Thr418, and Cys419. In some embodiments, an agent binds to a motif comprising one or more of the following residues within SEQ ID NO: 1: Ala305, Tyr306, Gly307, Asn 308, Gln309, Lys312, Lys345, Val346, Val349, Gln379, Asn380, Leu382, Trp383, Arg386, Asn387, Asp413, Asn415, Val416, Thr418, and Cys419. In some embodiments, provided technologies bind to a motif comprising at least 2, 3, 4, 5, 6, or 7 of G307, K312, K345, W383, N387, D413, and N415. In some embodiments, provided agents specifically bind to such motifs. In some embodiments, a motif may be referred to as a binding site. In some embodiments, provided technologies selectively bind to such a binding site over an Axin binding site. In some embodiments, provided technologies selectively bind to such a binding site over a Bcl9 binding site. In some embodiments, provided technologies selectively bind to such a binding site over a TCF binding site. In some embodiments, provided technology binds to such a binding site in a reverse N to C direction compared to TCF. In some embodiments, provided technologies do not bind to Axin binding site of beta-catenin. In some embodiments, provided technologies do not bind to Bcl9 binding site of beta-catenin. Various technologies, e.g., crystallography, NMR, biochemical assays, etc., may be utilized to assess interactions with beta-catenin in accordance with the present disclosure.

[0010] In some embodiments, there are two amino acid residues between two amino acid residues bonded to the same staple. Such a staple may be referred to as a (i, i+3) staple. Similarly, in some embodiments, there are 3, 4, 5, 6, 7, 8, 9, or 10 amino acid residues between two amino acid residues bonded to the same staple, and such a staple may be referred to as a (i, i+4), (i, i+5), (i, i+6), (i, i+7), (i, i+8), (i, i+9), (i, i+10), or (i, i+11) staple, respectively. In some embodiments, a staple is (i, i+3). In some embodiments, a staple is (i, i+4). In some embodiments, a staple is (i, i+7). In some embodiments, there are two staples in a provided agent. In some embodiments, one staple is (i, i+3) and the other is (i, i+7).

[0011] In some embodiments, the present disclosure provides an agent of formula I:

R^{N}-L^{P1}-L^{AA1}-L^{P2}L^{AA2}-L^{P3}-L^{AA3}-L^{P4}-L^{AA4}-L^{P5}-L^{AA5}-L^{P6}-L^{AA6}-L^{P7}-R^{C} I

or a salt thereof, wherein each variable is independently as described herein.

[0012] In some embodiments, the present disclosure provides an agent which is or comprises:

X¹X²X³X⁴X⁵X⁶X⁷X⁸X⁹X¹⁰X¹¹X¹²X¹³,

wherein:
[0013] each of X¹, X², X³, X⁴, X⁵, X⁶, X⁷, X⁸, X⁹, X¹⁰, X¹¹, X¹², and X¹³ is independently an amino acid residue, wherein:
[0014] X² comprises a side chain comprising an acidic or polar group;
[0015] X⁵ comprises a side chain comprising an acidic or polar group;
[0016] X⁹ comprises a side chain comprising an optionally substituted aromatic group;
[0017] X² comprises a side chain comprising an optionally substituted aromatic group; and
[0018] X¹³ comprises a side chain comprising an optionally substituted aromatic group.

[0019] In some embodiments, the present disclosure provides an agent which is or comprises:

X¹X²X³X⁴X⁵X⁶X⁷X⁸X⁹X¹⁰X¹¹X¹²X¹³[X¹⁴]ₚ₁₄[X¹⁵]ₚ₁₅[X¹⁶]ₚ₁₆[X¹⁷]ₚ₁₇,

wherein:
[0020] each of p14, p15, p16 and p17 is independently 0 or 1;
[0021] each of X¹, X², X³, X⁴, X⁵, X⁶, X⁷, X⁸, X⁹, X¹⁰, X¹¹, X¹², X¹³, X¹⁴, X¹⁵, X¹⁶, and X¹⁷ is independently an amino acid residue, wherein:
[0022] X² comprises a side chain comprising an acidic or polar group;
[0023] X⁵ comprises a side chain comprising an acidic or polar group;
[0024] X⁹ comprises a side chain comprising an optionally substituted aromatic group;
[0025] X¹² comprises a side chain comprising an optionally substituted aromatic group; and
[0026] X¹³ comprises a side chain comprising an optionally substituted aromatic group.

[0027] In some embodiments, the present disclosure provides an agent which is or comprises:

[X]pX¹X²X³X⁴X⁵X⁶X⁷X⁸X⁹X¹⁰X¹¹X¹²X¹³[X¹⁴]ₚ₁₄[X¹⁵]ₚ₁₅[X¹⁶]ₚ₁₆[X¹⁷]ₚ₁₇[X]p′;

wherein:
[0028] each of p14, p15, p¹⁶ and p17 is independently 0 or 1;
[0029] each of p and p′ is independently 0-10;
[0030] each of X, X¹, X², X³, X⁴, X⁵, X⁶, X⁷, X⁸, X⁹, X¹⁰, X¹¹, X¹², X¹³, X¹⁴, X¹⁵, X¹⁶, and X¹⁷ is independently an amino acid residue, wherein:
[0031] X² comprises a side chain comprising an acidic or polar group;
[0032] X⁵ comprises a side chain comprising an acidic or polar group;
[0033] X⁹ comprises a side chain comprising an optionally substituted aromatic group;
[0034] X¹² comprises a side chain comprising an optionally substituted aromatic group; and
[0035] X¹³ comprises a side chain comprising an optionally substituted aromatic group.

[0036] In some embodiments, an agent is [X]pX¹X²X³X⁴X⁵X⁶X⁷X⁸X⁹X¹⁰X¹¹X¹²X¹³[X¹⁴]ₚ₁₄[X¹⁵]ₚ₁₅[X¹⁶]ₚ₁₆[X¹⁷]ₚ₁₇[X]p′. In some embodiments, an agent is R^{N}—[X]pX¹X²X³X⁴X⁵X⁶X⁷X⁸X⁹X¹⁰X¹¹X¹²X¹³[X¹⁴]ₚ₁₄[X¹⁵]ₚ₁₅[X¹⁶]ₚ₁₆[X¹⁷]ₚ₁₇[X]p′-R^{C}.

[0037] In some embodiments, the present disclosure provides an agent which is or comprises:

X¹X²X³X⁴X⁵X⁶X⁷X⁸X⁹X¹⁰X¹¹X¹²X¹³[X¹⁴]ₚ₁₄[X¹⁵]ₚ₁₅[X¹⁶]ₚ₁₆[X¹⁷]ₚ₁₇[X¹⁸]p¹⁸[X¹⁹]ₚ₁₉[X²⁰]ₚ₂₀[X²¹]ₚ₂₁[X²²]ₚ₂₂[X²³]ₚ₂₃,

wherein:
[0038] each of p14, p15, p16, p17, p18, p19, p20, p21, p22, and p23 is independently 0 or 1;
[0039] each of X¹, X², X³, X⁴, X⁵, X⁶, X⁷, X⁸, X⁹, X¹⁰, X¹¹, X¹², X¹³, X¹⁴, X¹⁵, X¹⁶, X¹⁷, X¹⁸, X¹⁹, X²⁰, X²¹, X²², and X²³ is independently an amino acid residue, wherein:
[0040] X² comprises a side chain comprising an acidic or polar group;
[0041] X⁵ comprises a side chain comprising an acidic or polar group;
[0042] X⁹ comprises a side chain comprising an optionally substituted aromatic group;
[0043] X¹² comprises a side chain comprising an optionally substituted aromatic group; and
[0044] X¹³ comprises a side chain comprising an optionally substituted aromatic group.

[0045] In some embodiments, an agent is or comprises a peptide. In some embodiments, an agent is or comprises a stapled peptide. In some embodiments, X¹ and X⁴, and/or X⁴ and X¹¹ are independently amino acid residues suitable for stapling, or are stapled, X³ and X¹⁰ independently amino acid residues suitable for stapling, or are stapled, X¹ and X⁴, and/or X¹⁰ and X¹⁴ are independently amino acid residues suitable for stapling, or are stapled, or X¹ and X⁴, and/or X⁷ and X¹⁴ are independently amino acid residues suitable for stapling, or are stapled. In some embodiments, X¹ and X⁴ are independently amino acid residues suitable for stapling. In some embodiments, X¹ and X⁴ are stapled. In some embodiments, X⁴ and X¹¹ are independently amino acid residues suitable for stapling. In some embodiments, X⁴ and X¹¹ are stapled. In some embodiments, X¹⁰ and X¹⁴ are independently amino acid residues suitable for stapling. In some embodiments, X¹⁰ and X¹⁴ are stapled. In some embodiments, X⁷ and X¹⁴ are independently amino acid residues suitable for stapling. In some embodiments, X⁷ and X¹⁴ are stapled. In some embodiments, X¹ and X⁴, and X¹⁰ and X¹⁴ are independently amino acid residues suitable for stapling. In some embodiments, X¹ and X⁴ are stapled, and X¹⁰ and X¹⁴ are stapled. In some embodiments, X¹ and X⁴, and X⁷ and X¹⁴ are independently amino acid residues suitable for stapling. In some embodiments, X¹ and X⁴ are stapled, and X⁷ and X¹⁴ are stapled. In some embodiments, X¹ and X⁴, and X⁴ and X¹¹ are independently amino acid residues suitable for stapling. In some embodiments, a stapled peptide is a stitched peptide comprising two or more staples, some of which may bond to the same backbone atom. In some embodiments, X¹ and X⁴ are stapled, and X⁴ and X¹¹ are stapled. In some embodiments, a staple connecting X¹ and X⁴ and a staple connecting X⁴ and X¹¹ are bonded to a common backbone atom of X⁴. In some embodiments, a common backbone atom is the alpha-carbon of X⁴. In some embodiments, X³ and X¹⁰ are independently amino acid residues suitable for stapling. In some embodiments, X³ and X¹⁰ are stapled.

[0046] In some embodiments, the present disclosure provides agents that bind to a polypeptide comprising or consisting of residues 305-419 of SEQ ID NO: 1. In some embodiments, an agent has a molecular mass of no more than about 5000 Daltons. In some embodiments, it is no more than about 2500, 3000, 3500, 4000, 4500 or 5000 Daltons. In some embodiments, it is no more than about 2500 Daltons. In some embodiments, it is no more than about 3000 Daltons. In some embodiments, it is no more than about 3500 Daltons. In some embodiments, it is no more than about 4000 Daltons. In some embodiments, it is no more than about 500 Daltons.

[0047] In some embodiments, the present disclosure provides various reagents and methods associated with provided agents including, for example, reagents and/or systems for identifying, characterizing and/or assessing them, strategies for preparing them, and various diagnostic and therapeutic methods relating to them.

[0048] In some embodiments, the present disclosure provides pharmaceutical compositions comprising or delivering a provided agent and a pharmaceutical acceptable carrier. In some embodiments, a provided agent is a pharmaceutically acceptable salt form. In some embodiments, a provided composition comprises a pharmaceutically acceptable salt form an agent. In some embodiments, in various compositions and methods, agents are provided as pharmaceutically acceptable salt forms.

[0049] In some embodiments, the present disclosure provides methods for modulating a property, activity and/or function of beta-catenin, comprising contacting beta-catenin with a provided agent. In some embodiments, the present disclosure provides methods for modulating a property, activity and/or function of beta-catenin in a system comprising beta-catenin, comprising administering to a system an effective amount of a provided agent. In some embodiments, the present disclosure provides methods for modulating a property, activity and/or function of beta-catenin in a system expressing beta-catenin, comprising administering or delivering to a system an effective amount of a provided agent. In some embodiments, an activity of beta-catenin is inhibited or reduced. In some embodiments, a function of beta-catenin is inhibited or reduced. In some embodiments, a property, activity and/or function is associated with beta-catenin/TCF interaction.

[0050] In some embodiments, the present disclosure provides methods for modulating beta-catenin/TCF interaction. In some embodiments, the present disclosure provides methods for modulating beta-catenin/TCF interaction, comprising contacting beta-catenin with a provided agent. In some embodiments, the present disclosure provides methods for modulating beta-catenin/TCF interaction in a system comprising beta-catenin and TCF, comprising administering or delivering to the system an effective amount a provided agent. In some embodiments, the present disclosure provides methods for modulating beta-catenin/TCF interaction in a system expressing beta-catenin and TCF, comprising administering or delivering to the system an effective amount a provided agent. In some embodiments, interactions between beta-catenin and TCF is reduced. In some embodiments, interactions between beta-catenin and TCF is inhibited.

[0051] In some embodiments, the present disclosure provides methods for inhibiting cell proliferation, comprising administering or delivering to a population of cells an effective amount of a provided agent. In some embodiments, the present disclosure provides methods for inhibiting cell proliferation in a system, comprising administering or delivering to the system an effective amount of a provided agent. In some embodiments, the present disclosure provides methods for inhibiting cell growth, comprising administering or delivering to a population of cells an effective amount of a provided agent. In some embodiments, the present disclosure provides methods for inhibiting cell growth in a system, comprising administering or delivering to the system an effective amount of a provided agent. In some embodiments, such cell proliferation is beta-catenin dependent. In some embodiments, such cell growth is beta-catenin dependent. In some embodiments, such proliferation or growth is dependent on beta-catenin interactions with TCF.

[0052] In some embodiments, the present disclosure provides methods for reducing or preventing activation of a WNT pathway. In some embodiments, the present disclosure provides methods for reducing or preventing activation of a WNT pathway in a system, comprising administering or delivering to the system an effective amount of a provided agent.

[0053] In some embodiments, a system is in vitro. In some embodiments, a system is ex vivo. In some embodiments, a system is in vivo. In some embodiments, a system is or comprise a cell. In some embodiments, a system is or comprises a tissue. In some embodiments, a system is or comprises an organ. In some embodiments, a system is or comprises an organism. In some embodiments, a system is an animal. In some embodiments, a system is human. In some embodiments, a system is or comprises cells, tissues or organs associated with a condition, disorder or disease. In some embodiments, a system is or comprises cancer cells.

[0054] In some embodiments, the present disclosure provides methods for preventing conditions, disorders or diseases. In some embodiments, the present disclosure provides methods for reducing risks of conditions, disorders or diseases. In some embodiments, the present disclosure provides methods for preventing a condition, disorder or disease, comprising administering or delivering to a subject susceptible thereto an effective amount of an agent of the present disclosure. In some embodiments, the present disclosure provides methods for reducing risk of a condition, disorder or disease, comprising administering or delivering to a subject susceptible thereto an effective amount of an agent of the present disclosure. In some embodiments, the present disclosure provides methods for reducing risks of a condition, disorder or disease in a population, comprising administering or delivering to a population of subjects susceptible thereto an effective amount of an agent of the present disclosure. In some embodiments, the present disclosure provides methods for treating conditions, disorders or diseases. In some embodiments, the present disclosure provides methods for treating a condition, disorder or disease, comprising administering or delivering to a subject suffering therefrom an effective amount of an agent of the present disclosure. In some embodiments, a symptom is reduced, removed or prevented. In some embodiments, one or more parameters for assessing a condition, disorder or disease are improved. In some embodiments, survival of subjects are extended. As appreciated by those skilled in the art, in some embodiments, prevention, reduced risks, and/or effects of treatment may be assessed through clinical trials and may be observed in subject populations. In some embodiments, a condition, disorder or disease is cancer. In some embodiments, a condition, disorder or disease is associated with beta-catenin. In some embodiments, a condition, disorder or disease is associated with beta-catenin interaction with TCF. In some embodiments, a condition, disorder or disease is bladder cancer. In some embodiments, a condition, disorder or disease is endometrial cancer. In some embodiments, a condition, disorder or disease is adrenocortical carcinoma. In some embodiments, a condition, disorder or disease is gastric cancer. In some embodiments, a condition, disorder or disease is lung cancer. In some embodiments, a condition, disorder or disease is melanoma. In some embodiments, a condition, disorder or disease is esophageal cancer. In some embodiments, a condition, disorder or disease is colorectal cancer. In some embodiments, a cancer is liver cancer. In some embodiments, a cancer is prostate cancer. In some embodiments, a cancer is breast cancer. In some embodiments, a cancer is endometrial cancer.

[0055] In some embodiments, agents are administered as pharmaceutically compositions that comprise or deliver such agents. In some embodiments, agents are provided and/or delivered in pharmaceutically acceptable salt forms. In some embodiments, in a composition (e.g., a liquid composition of certain pH) an agent may exist in various forms including various pharmaceutically acceptable salt forms.

[0056] In some embodiments, a provided agent is utilized in combination with a second therapy. In some embodiments, a provided agent is utilized in combination with a second therapeutic agent. In some embodiments, a second therapy or therapeutic agent is administered prior to an administration or delivery of a provided agent. In some embodiments, a second therapy or therapeutic agent is administered at about the same time as an administration or delivery of a provided agent. In some embodiments, a second therapy or therapeutic agent is administered subsequently to an administration or delivery of a provided agent. In some embodiments, a subject is exposed to both a provided agent and a second therapeutic agent. In some embodiments, a subject is exposed to a therapeutic effect of a provided agent and a therapeutic effect of a second therapeutic agent. In some embodiments, a second therapy is or comprises surgery. In some embodiments, a second therapy is or comprises radiation therapy. In some embodiments, a second therapy is or comprises immunotherapy. In some embodiments, a second therapeutic agent is or comprises a drug. In some embodiments, a second therapeutic agent is or comprises a cancer drug. In some embodiments, a second therapeutic agent is or comprises a chemotherapeutic agent. In some embodiments, a second therapeutic agent is or comprises a hormone therapy agent. In some embodiments, a second therapeutic agent is or comprises a kinase inhibitor. In some embodiments, a second therapeutic agent is or comprises a checkpoint inhibitor (e.g., antibodies against PD1-, PD-L1, CTLA-4, etc.). In some embodiments, a provide agent can be administered with lower unit dose and/or total dose compared to being used alone. In some embodiments, a second agent can be administered with lower unit dose and/or total dose compared to being used alone. In some embodiments, one or more side effects associated with administration of a provided agent and/or a second therapy or therapeutic agent are reduced. In some embodiments, a combination therapy provides improved results, e.g., when compared to each agent utilized individually. In some embodiments, a combination therapy achieves one or more better results, e.g., when compared to each agent utilized individually.

[0057] Further description of certain embodiments of these aspects, and others, of the present disclosure, is presented below.

### BRIEF DESCRIPTION OF THE DRAWING

[0058] FIG. 1. Provided agents can modulate gene expression in cells. As demonstrated herein, provided peptides can effectively reduce expression of various nucleic acids such as Axin2 and Myc. For each gene, from left to right: I-796, I-849, and I-922.

[0059] FIG. 2. Provided technologies do not significantly impact expression of various beta-catenin-independent genes including various beta-catenin-independent WNT target genes such as PLOD2 and LCOR. For each gene, from left to right: I-796, I-849, and I-922.

[0060] FIG. 3. Provided technologies can effectively modulate expression. As shown in a report assay (I-849: square; I-922: triangle), provided peptides can effectively reduce expression compared to a control peptide I-796 (circle).

### DETAILED DESCRIPTION OF CERTAIN EMBODIMENTS

### Definitions

[0061] As used herein, the following definitions shall apply unless otherwise indicated. For purposes of this disclosure, the chemical elements are identified in accordance with the Periodic Table of the Elements, CAS version, Handbook of Chemistry and Physics, 75^{th} Ed. Additionally, general principles of organic chemistry are described in “Organic Chemistry”, Thomas Sorrell, University Science Books, Sausalito: 1999, and “March's Advanced Organic Chemistry”, 5^{th} Ed., Ed.: Smith, M. B. and March, J., John Wiley & Sons, New York: 2001.

[0062] Administration: As used herein, the term “administration” typically refers to the administration of a composition to a subject or system. Those of ordinary skill in the art will be aware of a variety of routes that may, in appropriate circumstances, be utilized for administration to a subject, for example a human. For example, in some embodiments, administration may be ocular, oral, parenteral, topical, etc. In some particular embodiments, administration may be bronchial (e.g., by bronchial instillation), buccal, dermal (which may be or comprise, for example, one or more of topical to the dermis, intradermal, interdermal, transdermal, etc), enteral, intra-arterial, intradermal, intragastric, intramedullary, intramuscular, intranasal, intraperitoneal, intrathecal, intravenous, intraventricular, within a specific organ (e. g., intrahepatic), mucosal, nasal, oral, rectal, subcutaneous, sublingual, topical, tracheal (e.g., by intratracheal instillation), vaginal, vitreal, etc. In some embodiments, administration may involve dosing that is intermittent (e.g., a plurality of doses separated in time) and/or periodic (e.g., individual doses separated by a common period of time) dosing. In some embodiments, administration may involve continuous dosing (e.g., perfusion) for at least a selected period of time.

[0063] Affinity: As is known in the art, “affinity” is a measure of the tightness with a particular ligand (e.g., an agent) binds to its partner (e.g., beta-catenin or a portion thereof). Affinities can be measured in different ways. In some embodiments, affinity is measured by a quantitative assay. In some such embodiments, binding partner concentration may be fixed to be in excess of ligand concentration so as to mimic physiological conditions. Alternatively or additionally, in some embodiments, binding partner concentration and/or ligand concentration may be varied. In some such embodiments, affinity may be compared to a reference under comparable conditions (e.g., concentrations).

[0064] Agent: In general, the term “agent”, as used herein, may be used to refer to a compound or entity of any chemical class including, for example, a polypeptide, nucleic acid, saccharide, lipid, small molecule, metal, or combination or complex thereof. In appropriate circumstances, as will be clear from context to those skilled in the art, the term may be utilized to refer to an entity that is or comprises a cell or organism, or a fraction, extract, or component thereof. Alternatively or additionally, as context will make clear, the term may be used to refer to a natural product in that it is found in and/or is obtained from nature. In some instances, again as will be clear from context, the term may be used to refer to one or more entities that is man-made in that it is designed, engineered, and/or produced through action of the hand of man and/or is not found in nature. In some embodiments, an agent may be utilized in isolated or pure form; in some embodiments, an agent may be utilized in crude form. In some embodiments, potential agents may be provided as collections or libraries, for example that may be screened to identify or characterize active agents within them. In some cases, the term “agent” may refer to a compound or entity that is or comprises a polymer; in some cases, the term may refer to a compound or entity that comprises one or more polymeric moieties. In some embodiments, the term “agent” may refer to a compound or entity that is not a polymer and/or is substantially free of any polymer and/or of one or more particular polymeric moieties. In some embodiments, the term may refer to a compound or entity that lacks or is substantially free of any polymeric moiety. In some embodiments, an agent is a compound. In some embodiments, an agent is a stapled peptide.

[0065] Aliphatic: As used herein, “aliphatic” means a straight-chain (i.e., unbranched) or branched, substituted or unsubstituted hydrocarbon chain that is completely saturated or that contains one or more units of unsaturation, or a substituted or unsubstituted monocyclic, bicyclic, or polycyclic hydrocarbon ring that is completely saturated or that contains one or more units of unsaturation (but not aromatic), or combinations thereof. In some embodiments, aliphatic groups contain 1-50 aliphatic carbon atoms. In some embodiments, aliphatic groups contain 1-20 aliphatic carbon atoms. In other embodiments, aliphatic groups contain 1-10 aliphatic carbon atoms. In other embodiments, aliphatic groups contain 1-9 aliphatic carbon atoms. In other embodiments, aliphatic groups contain 1-8 aliphatic carbon atoms. In other embodiments, aliphatic groups contain 1-7 aliphatic carbon atoms. In other embodiments, aliphatic groups contain 1−6 aliphatic carbon atoms. In still other embodiments, aliphatic groups contain 1-5 aliphatic carbon atoms, and in yet other embodiments, aliphatic groups contain 1, 2, 3, or 4 aliphatic carbon atoms. Suitable aliphatic groups include, but are not limited to, linear or branched, substituted or unsubstituted alkyl, alkenyl, alkynyl groups and hybrids thereof such as (cycloalkyl)alkyl, (cycloalkenyl)alkyl or (cycloalkyl)alkenyl.

[0066] Alkenyl: As used herein, the term “alkenyl” refers to an aliphatic group, as defined herein, having one or more double bonds.

[0067] Alkyl: As used herein, the term “alkyl” is given its ordinary meaning in the art and may include saturated aliphatic groups, including straight-chain alkyl groups, branched-chain alkyl groups, cycloalkyl (alicyclic) groups, alkyl substituted cycloalkyl groups, and cycloalkyl substituted alkyl groups. In some embodiments, alkyl has 1-100 carbon atoms. In certain embodiments, a straight chain or branched chain alkyl has about 1-20 carbon atoms in its backbone (e.g., C₁-C₂₀ for straight chain, C₂-C₂₀ for branched chain), and alternatively, about 1-10. In some embodiments, cycloalkyl rings have from about 3-10 carbon atoms in their ring structure where such rings are monocyclic, bicyclic, or polycyclic, and alternatively about 5, 6 or 7 carbons in the ring structure. In some embodiments, an alkyl group may be a lower alkyl group, wherein a lower alkyl group comprises 1-4 carbon atoms (e.g., C₁-C₄ for straight chain lower alkyls).

[0068] Alkylene: The term “alkylene” refers to a bivalent alkyl group.

[0069] Amino acid: In its broadest sense, as used herein, refers to any compound and/or substance that can be incorporated into a polypeptide chain, e.g., through formation of one or more peptide bonds. In some embodiments, an amino acid comprising an amino group and an a carboxylic acid group. In some embodiments, an amino acid has the structure of NH(R^{a1})-L^{a1}-C(R^{a2})(R^{a3})-L^{a2}-COOH, wherein each variable is independently as described in the present disclosure. In some embodiments, an amino acid has the general structure NH(R′)—C(R′)₂—COOH, wherein each R′ is independently as described in the present disclosure. In some embodiments, an amino acid has the general structure H₂N—C(R′)₂—COOH, wherein R′ is as described in the present disclosure. In some embodiments, an amino acid has the general structure H₂N—C(H)(R′)—COOH, wherein R′ is as described in the present disclosure. In some embodiments, an amino acid is a naturally-occurring amino acid. In some embodiments, an amino acid is a non-natural amino acid; in some embodiments, an amino acid is a D-amino acid; in some embodiments, an amino acid is an L-amino acid. “Standard amino acid” refers to any of the twenty standard L-amino acids commonly found in naturally occurring peptides. “Nonstandard amino acid” refers to any amino acid, other than the standard amino acids, regardless of whether it is prepared synthetically or obtained from a natural source. In some embodiments, an amino acid, including a carboxy- and/or amino-terminal amino acid in a polypeptide, can contain a structural modification as compared with the general structure above. For example, in some embodiments, an amino acid may be modified by methylation, amidation, acetylation, pegylation, glycosylation, phosphorylation, and/or substitution (e.g., of the amino group, the carboxylic acid group, one or more protons, one or more hydrogens, and/or the hydroxyl group) as compared with the general structure. In some embodiments, such modification may, for example, alter the circulating half-life of a polypeptide containing the modified amino acid as compared with one containing an otherwise identical unmodified amino acid. In some embodiments, such modification does not significantly alter a relevant activity of a polypeptide containing the modified amino acid, as compared with one containing an otherwise identical unmodified amino acid. As will be clear from context, in some embodiments, the term “amino acid” may be used to refer to a free amino acid; in some embodiments it may be used to refer to an amino acid residue of a polypeptide.

[0070] Analog: As used herein, the term “analog” refers to a substance that shares one or more particular structural features, elements, components, or moieties with a reference substance. Typically, an “analog” shows significant structural similarity with the reference substance, for example sharing a core or consensus structure, but also differs in certain discrete ways. In some embodiments, an analog is a substance that can be generated from the reference substance, e.g., by chemical manipulation of the reference substance. In some embodiments, an analog is a substance that can be generated through performance of a synthetic process substantially similar to (e.g., sharing a plurality of steps with) one that generates the reference substance. In some embodiments, an analog is or can be generated through performance of a synthetic process different from that used to generate the reference substance.

[0071] Animal: As used herein refers to any member of the animal kingdom. In some embodiments, “animal” refers to humans, of either sex and at any stage of development. In some embodiments, “animal” refers to non-human animals, at any stage of development. In certain embodiments, the non-human animal is a mammal (e.g., a rodent, a mouse, a rat, a rabbit, a monkey, a dog, a cat, a sheep, cattle, a primate, and/or a pig). In some embodiments, animals include, but are not limited to, mammals, birds, reptiles, amphibians, fish, insects, and/or worms. In some embodiments, an animal may be a transgenic animal, genetically engineered animal, and/or a clone.

[0072] Approximately: As used herein, the term “approximately” or “about,” as applied to one or more values of interest, refers to a value that is similar to a stated reference value. In certain embodiments, the term “approximately” or “about” refers to a range of values that fall within 25%, 20%, 19%, 18%, 17%, 16%, 15%, 14%, 13%, 12%, 11%, 10%, 9%, 8%, 7%, 6%, 5%, 4%, 3%, 2%, 1%, or less in either direction (greater than or less than) of the stated reference value unless otherwise stated or otherwise evident from the context (except where such number would exceed 100% of a possible value).

[0073] Aryl: The term “aryl” used alone or as part of a larger moiety as in “aralkyl,” “aralkoxy,” “aryloxyalkyl,” etc. refers to monocyclic, bicyclic or polycyclic ring systems having a total of five to thirty ring members, wherein at least one ring in the system is aromatic. In some embodiments, an aryl group is a monocyclic, bicyclic or polycyclic ring system having a total of five to fourteen ring members, wherein at least one ring in the system is aromatic, and wherein each ring in the system contains 3 to 7 ring members. In some embodiments, an aryl group is a biaryl group. The term “aryl” may be used interchangeably with the term “aryl ring.” In certain embodiments of the present disclosure, “aryl” refers to an aromatic ring system which includes, but not limited to, phenyl, biphenyl, naphthyl, binaphthyl, anthracyl and the like, which may bear one or more substituents. In some embodiments, also included within the scope of the term “aryl,” as it is used herein, is a group in which an aromatic ring is fused to one or more non-aromatic rings, such as indanyl, phthalimidyl, naphthimidyl, phenanthridinyl, or tetrahydronaphthyl, and the like, where a radical or point of attachment is on an aryl ring.

[0074] Associated with: Two events or entities are “associated” with one another, as that term is used herein, if the presence, level and/or form of one is correlated with that of the other. For example, a particular entity (e.g., nucleic acid (e.g., genomic DNA, transcripts, mRNA, etc.), polypeptide, genetic signature, metabolite, microbe, etc.) is considered to be associated with a particular disease, disorder, or condition, if its presence, level and/or form correlates with incidence of and/or susceptibility to the disease, disorder, or condition (e.g., across a relevant population).

[0075] Binding: It will be understood that the term “binding”, as used herein, typically refers to a non-covalent association between or among agents. In many embodiments herein, binding is addressed with respect to particular agents and beta-catenin. It will be appreciated by those of ordinary skill in the art that such binding may be assessed in any of a variety of contexts. In some embodiments, binding is assessed with respect to beta-catenin. In some embodiments, binding is assessed with respect to one or more amino acid residues of beta-catenin. In some embodiments, binding is assessed with respect to one or more amino acid residues corresponding to (e.g., similarly positioned in three dimensional space and/or having certain similar properties and/or functions) those of beta-catenin.

[0076] Binding site: The term “binding site”, as used herein, refers to a region of a target polypeptide, formed in three-dimensional space, that includes one or more or all interaction residues of the target polypeptide. In some embodiments, “binding site” may refer to one or more amino acid residues which comprise or are one or more or all interaction amino acid residues of a target polypeptide. As will be understood by those of ordinary skill in the art, a binding site may include residues that are adjacent to one another on a linear chain, and/or that are distal to one another on a linear chain but near to one another in three-dimensional space when a target polypeptide is folded. A binding site may comprise amino acid residues and/or saccharide residues.

[0077] Carrier: as used herein, refers to a diluent, adjuvant, excipient, or vehicle with which a composition is administered. In some exemplary embodiments, carriers can include sterile liquids, such as, for example, water and oils, including oils of petroleum, animal, vegetable or synthetic origin, such as, for example, peanut oil, soybean oil, mineral oil, sesame oil and the like. In some embodiments, carriers are or include one or more solid components.

[0078] Comparable: As used herein, the term “comparable” refers to two or more agents, entities, situations, sets of conditions, etc., that may not be identical to one another but that are sufficiently similar to permit comparison there between so that one skilled in the art will appreciate that conclusions may reasonably be drawn based on differences or similarities observed. In some embodiments, comparable sets of conditions, circumstances, individuals, or populations are characterized by a plurality of substantially identical features and one or a small number of varied features. Those of ordinary skill in the art will understand, in context, what degree of identity is required in any given circumstance for two or more such agents, entities, situations, sets of conditions, etc. to be considered comparable. For example, those of ordinary skill in the art will appreciate that sets of circumstances, individuals, or populations are comparable to one another when characterized by a sufficient number and type of substantially identical features to warrant a reasonable conclusion that differences in results obtained or phenomena observed under or with different sets of circumstances, individuals, or populations are caused by or indicative of the variation in those features that are varied.

[0079] Composition: Those skilled in the art will appreciate that the term “composition” may be used to refer to a discrete physical entity that comprises one or more specified components. In general, unless otherwise specified, a composition may be of any form—e.g., gas, gel, liquid, solid, etc.

[0080] Cycloaliphatic: The term “cycloaliphatic,” as used herein, refers to saturated or partially unsaturated aliphatic monocyclic, bicyclic, or polycyclic ring systems having, e.g., from 3 to 30, members, wherein the aliphatic ring system is optionally substituted. Cycloaliphatic groups include, without limitation, cyclopropyl, cyclobutyl, cyclopentyl, cyclopentenyl, cyclohexyl, cyclohexenyl, cycloheptyl, cycloheptenyl, cyclooctyl, cyclooctenyl, norbornyl, adamantyl, and cyclooctadienyl. In some embodiments, the cycloalkyl has 3−6 carbons. The terms “cycloaliphatic” may also include aliphatic rings that are fused to one or more aromatic or nonaromatic rings, such as decahydronaphthyl or tetrahydronaphthyl, where a radical or point of attachment is on an aliphatic ring. In some embodiments, a carbocyclic group is bicyclic. In some embodiments, a carbocyclic group is tricyclic. In some embodiments, a carbocyclic group is polycyclic. In some embodiments, “cycloaliphatic” (or “carbocycle” or “cycloalkyl”) refers to a monocyclic C₃-C₆ hydrocarbon, or a C₈-C₁₀ bicyclic hydrocarbon that is completely saturated or that contains one or more units of unsaturation, but which is not aromatic, or a C₉-C₁₆ tricyclic hydrocarbon that is completely saturated or that contains one or more units of unsaturation, but which is not aromatic.

[0081] Derivative: As used herein, the term “derivative” refers to a structural analogue of a reference substance. That is, a “derivative” is a substance that shows significant structural similarity with the reference substance, for example sharing a core or consensus structure, but also differs in certain discrete ways. In some embodiments, a derivative is a substance that can be generated from the reference substance by chemical manipulation. In some embodiments, a derivative is a substance that can be generated through performance of a synthetic process substantially similar to (e.g., sharing a plurality of steps with) one that generates the reference substance.

[0082] Dosageform or unit dosage form: Those skilled in the art will appreciate that the term “dosage form” may be used to refer to a physically discrete unit of an active agent (e.g., a therapeutic or diagnostic agent) for administration to a subject. Typically, each such unit contains a predetermined quantity of active agent. In some embodiments, such quantity is a unit dosage amount (or a whole fraction thereof) appropriate for administration in accordance with a dosing regimen that has been determined to correlate with a desired or beneficial outcome when administered to a relevant population (i.e., with a therapeutic dosing regimen). Those of ordinary skill in the art appreciate that the total amount of a therapeutic composition or agent administered to a particular subject is determined by one or more attending physicians and may involve administration of multiple dosage forms.

[0083] Dosing regimen: Those skilled in the art will appreciate that the term “dosing regimen” may be used to refer to a set of unit doses (typically more than one) that are administered individually to a subject, typically separated by periods of time. In some embodiments, a given therapeutic agent has a recommended dosing regimen, which may involve one or more doses. In some embodiments, a dosing regimen comprises a plurality of doses each of which is separated in time from other doses. In some embodiments, individual doses are separated from one another by a time period of the same length; in some embodiments, a dosing regimen comprises a plurality of doses and at least two different time periods separating individual doses. In some embodiments, all doses within a dosing regimen are of the same unit dose amount. In some embodiments, different doses within a dosing regimen are of different amounts. In some embodiments, a dosing regimen comprises a first dose in a first dose amount, followed by one or more additional doses in a second dose amount different from the first dose amount. In some embodiments, a dosing regimen comprises a first dose in a first dose amount, followed by one or more additional doses in a second dose amount same as the first dose amount. In some embodiments, a dosing regimen is correlated with a desired or beneficial outcome when administered across a relevant population (i.e., is atherapeutic dosing regimen).

[0084] Engineered: In general, the term “engineered” refers to the aspect of having been manipulated by the hand of man. For example, in some embodiments, a peptide may be considered to be engineered if its amino acid sequence has been selected by man. For example, an engineered agent has an amino acid sequence that was selected based on preferences for corresponding amino acids at particular sites of protein-protein interactions. In some embodiments, an engineered sequence has an amino acid sequence that differs from the amino acid sequence of polypeptides included in the NCBI database that binds to a TCF site of beta-catenin. In many embodiments, provided agents are engineered agents. In some embodiments, engineered agents are peptide agents comprising non-natural amino acid residues, non-natural amino acid sequences, and/or peptide staples. In some embodiments, provided agents comprise or are engineered peptide agents which comprise engineered sequences.

[0085] Halogen: The term “halogen” means F, Cl, Br, or I.

[0086] Heteroaliphatic: The term “heteroaliphatic” is given its ordinary meaning in the art and refers to aliphatic groups as described herein in which one or more carbon atoms are replaced with one or more heteroatoms (e.g., oxygen, nitrogen, sulfur, silicon, phosphorus, and the like).

[0087] Heteroalkyl: The term “heteroalkyl” is given its ordinary meaning in the art and refers to alkyl groups as described herein in which one or more carbon atoms is replaced with a heteroatom (e.g., oxygen, nitrogen, sulfur, silicon, phosphorus, and the like). Examples of heteroalkyl groups include, but are not limited to, alkoxy, poly(ethylene glycol)-, alkyl-substituted amino, tetrahydrofuranyl, piperidinyl, morpholinyl, etc.

[0088] Heteroaryl: The terms “heteroaryl” and “heteroar-,” used alone or as part of a larger moiety, e.g., “heteroaralkyl,” or “heteroaralkoxy,” refer to monocyclic, bicyclic or polycyclic ring systems having, for example, a total of five to thirty, e.g., 5, 6, 9, 10, 14, etc., ring members, wherein at least one ring in the system is aromatic and at least one aromatic ring atom is a heteroatom. In some embodiments, a heteroatom is nitrogen, oxygen or sulfur. In some embodiments, a heteroaryl group is a group having 5 to 10 ring atoms (i.e., monocyclic, bicyclic or polycyclic), in some embodiments 5, 6, 9, or 10 ring atoms. In some embodiments, a heteroaryl group has 6, 10, or 14 π electrons shared in a cyclic array; and having, in addition to carbon atoms, from one to five heteroatoms. Heteroaryl groups include, without limitation, thienyl, furanyl, pyrrolyl, imidazolyl, pyrazolyl, triazolyl, tetrazolyl, oxazolyl, isoxazolyl, oxadiazolyl, thiazolyl, isothiazolyl, thiadiazolyl, pyridyl, pyridazinyl, pyrimidinyl, pyrazinyl, indolizinyl, purinyl, naphthyridinyl, and pteridinyl. In some embodiments, a heteroaryl is a heterobiaryl group, such as bipyridyl and the like. The terms “heteroaryl” and “heteroar-”, as used herein, also include groups in which a heteroaromatic ring is fused to one or more aryl, cycloaliphatic, or heterocyclyl rings, where a radical or point of attachment is on a heteroaromatic ring. Non-limiting examples include indolyl, isoindolyl, benzothienyl, benzofuranyl, dibenzofuranyl, indazolyl, benzimidazolyl, benzthiazolyl, quinolyl, isoquinolyl, cinnolinyl, phthalazinyl, quinazolinyl, quinoxalinyl, 4H-quinolizinyl, carbazolyl, acridinyl, phenazinyl, phenothiazinyl, phenoxazinyl, tetrahydroquinolinyl, tetrahydroisoquinolinyl, and pyrido[2,3-b]-1,4-oxazin-3(4H)-one. A heteroaryl group may be monocyclic, bicyclic or polycyclic. The term “heteroaryl” may be used interchangeably with the terms “heteroaryl ring,” “heteroaryl group,” or “heteroaromatic,” any of which terms include rings that are optionally substituted. The term “heteroaralkyl” refers to an alkyl group substituted by a heteroaryl group, wherein the alkyl and heteroaryl portions independently are optionally substituted.

[0089] Heteroatom: The term “heteroatom” means an atom that is not carbon and is not hydrogen. In some embodiments, a heteroatom is oxygen, sulfur, nitrogen, phosphorus, boron or silicon (including any oxidized form of nitrogen, sulfur, phosphorus, or silicon; the quaternized form of any basic nitrogen or a substitutable nitrogen of a heterocyclic ring (for example, N as in 3,4-dihydro-2H-pyrrolyl), NH (as in pyrrolidinyl) or NR+(as in N-substituted pyrrolidinyl); etc.). In some embodiments, a heteroatom is boron, nitrogen, oxygen, silicon, sulfur, or phosphorus. In some embodiments, a heteroatom is nitrogen, oxygen, silicon, sulfur, or phosphorus. In some embodiments, a heteroatom is nitrogen, oxygen, sulfur, or phosphorus. In some embodiments, a heteroatom is nitrogen, oxygen or sulfur.

[0090] Heterocyclyl: As used herein, the terms “heterocycle,” “heterocyclyl,” “heterocyclic radical,” and “heterocyclic ring” are used interchangeably and refer to a monocyclic, bicyclic or polycyclic ring moiety (e.g., 3-30 membered) that is saturated or partially unsaturated and has one or more heteroatom ring atoms. In some embodiments, a heteroatom is boron, nitrogen, oxygen, silicon, sulfur, or phosphorus. In some embodiments, a heteroatom is nitrogen, oxygen, silicon, sulfur, or phosphorus. In some embodiments, a heteroatom is nitrogen, oxygen, sulfur, or phosphorus. In some embodiments, a heteroatom is nitrogen, oxygen or sulfur. In some embodiments, a heterocyclyl group is a stable 5- to 7-membered monocyclic or 7- to 10-membered bicyclic heterocyclic moiety that is either saturated or partially unsaturated, and having, in addition to carbon atoms, one or more, preferably one to four, heteroatoms, as defined above. When used in reference to a ring atom of a heterocycle, the term “nitrogen” includes substituted nitrogen. As an example, in a saturated or partially unsaturated ring having 0-3 heteroatoms selected from oxygen, sulfur or nitrogen, the nitrogen may be N (as in 3,4-dihydro-2H-pyrrolyl), NH (as in pyrrolidinyl), or ⁺NR (as in N-substituted pyrrolidinyl). A heterocyclic ring can be attached to its pendant group at any heteroatom or carbon atom that results in a stable structure and any of the ring atoms can be optionally substituted. Examples of such saturated or partially unsaturated heterocyclic radicals include, without limitation, tetrahydrofuranyl, tetrahydrothienyl, pyrrolidinyl, piperidinyl, pyrrolinyl, tetrahydroquinolinyl, tetrahydroisoquinolinyl, decahydroquinolinyl, oxazolidinyl, piperazinyl, dioxanyl, dioxolanyl, diazepinyl, oxazepinyl, thiazepinyl, morpholinyl, and quinuclidinyl. The terms “heterocycle,” “heterocyclyl,” “heterocyclyl ring,” “heterocyclic group,” “heterocyclic moiety,” and “heterocyclic radical,” are used interchangeably herein, and also include groups in which a heterocyclyl ring is fused to one or more aryl, heteroaryl, or cycloaliphatic rings, such as indolinyl, 3H-indolyl, chromanyl, phenanthridinyl, or tetrahydroquinolinyl, where a radical or point of attachment is on a heteroaliphatic ring. A heterocyclyl group may be monocyclic, bicyclic or polycyclic. The term “heterocyclylalkyl” refers to an alkyl group substituted by a heterocyclyl, wherein the alkyl and heterocyclyl portions independently are optionally substituted.

[0091] Homology: As used herein, the term “homology” refers to the overall relatedness between polymeric molecules, e.g., between nucleic acid molecules (e.g., DNA molecules and/or RNA molecules) and/or between polypeptide molecules. In some embodiments, polymeric molecules are considered to be “homologous” to one another if their sequences are at least 25%, 30%, 35%, 40%, 45%, 50%, 55%, 60%, 65%, 70%, 75%, 80%, 85%, 90%, 95%, or 99% identical. In some embodiments, polymeric molecules are considered to be “homologous” to one another if their sequences are at least 25%, 30%, 35%, 40%, 45%, 50%, 55%, 60%, 65%, 70%, 75%, 80%, 85%, 90%, 95%, or 99% similar (e.g., containing residues with related chemical properties at corresponding positions). For example, as is well known by those of ordinary skill in the art, certain amino acids are typically classified as similar to one another as “hydrophobic” or “hydrophilic” amino acids, and/or as having “polar” or “non-polar” side chains. Substitution ofone amino acid for another ofthe same type may often be considered a “homologous” substitution. Typical amino acid categorizations are summarized below (hydrophobicity scale of Kyte and Doolittle, 1982: A simple method for displaying the hydropathic character of a protein. Mol. Biol. 157:105-132):

| | | | | Side Chain | Hydropathy |
|---|---|---|---|---|---|
| | 3 Letter | 1 Letter | Side Chain | Acidity/ | Index of Kyte |
| Amino Acid | Code | Code | Polarity | Basicity | and Doolittle |
| Alanine | Ala | A | nonpolar | neutral | 1.8 |
| Arginine | Arg | R | polar | basic | −4.5 |
| Asparagine | Asn | N | polar | neutral | −3.5 |
| Aspartic acid | Asp | D | polar | acidic | −3.5 |
| Cysteine | Cys | C | nonpolar | neutral | 2.5 |
| Glutamic acid | Glu | E | polar | acidic | −3.5 |
| Glutamine | Gln | Q | polar | neutral | −3.5 |
| Glycine | Gly | G | nonpolar | neutral | −0.4 |
| Histidine | His | H | polar | basic | −3.2 |
| Isoleucine | Ile | I | nonpolar | neutral | 4.5 |
| Leucine | Leu | L | nonpolar | neutral | 3.8 |
| Lysine | Lys | K | polar | basic | −3.9 |
| Methionine | Met | M | nonpolar | neutral | 1.9 |
| Phenylalanine | Phe | F | nonpolar | neutral | 2.8 |
| Proline | Pro | P | nonpolar | neutral | −1.6 |
| Serine | Ser | S | polar | neutral | −0.8 |
| Threonine | Thr | T | polar | neutral | −0.7 |
| Tryptophan | Trp | W | nonpolar | neutral | −0.9 |
| Tyrosine | Tyr | Y | polar | neutral | −1.3 |
| Valine | Val | V | nonpolar | neutral | 4.2 |

| Ambiguous Amino Acids | 3-Letter | 1-Letter |
|---|---|---|
| Asparagine or aspartic acid | Asx | B |
| Glutamine or glutamic acid | Glx | Z |
| Leucine or Isoleucine | Xle | J |
| Unspecified or unknown amino acid | Xaa | X |

[0092] As will be understood by those skilled in the art, a variety of algorithms are available that permit comparison of sequences in order to determine their degree of homology, including by permitting gaps of designated length in one sequence relative to another when considering which residues “correspond” to one another in different sequences. Calculation of the percent homology between two nucleic acid sequences, for example, can be performed by aligning the two sequences for optimal comparison purposes (e.g., gaps can be introduced in one or both of a first and a second nucleic acid sequences for optimal alignment and non-corresponding sequences can be disregarded for comparison purposes). In certain embodiments, the length of a sequence aligned for comparison purposes is at least 30%, at least 40%, at least 50%, at least 60%, at least 70%, at least 80%, at least 90%, at least 95%, or substantially 100% of the length of the reference sequence. The nucleotides at corresponding nucleotide positions are then compared. When a position in the first sequence is occupied by the same nucleotide as the corresponding position in the second sequence, then the molecules are identical at that position; when a position in the first sequence is occupied by a similar nucleotide as the corresponding position in the second sequence, then the molecules are similar at that position. The percent homology between the two sequences is a function of the number of identical and similar positions shared by the sequences, taking into account the number of gaps, and the length of each gap, which needs to be introduced for optimal alignment of the two sequences. Representative algorithms and computer programs useful in determining the percent homology between two nucleotide sequences include, for example, the algorithm of Meyers and Miller (CABIOS, 1989, 4: 11-17), which has been incorporated into the ALIGN program (version 2.0) using a PAM120 weight residue table, a gap length penalty of 12 and a gap penalty of 4. The percent homology between two nucleotide sequences can, alternatively, be determined for example using the GAP program in the GCG software package using an NWSgapdna.CMP matrix.

[0093] Interaction residues: The term “interaction residues”, “interaction motifs”, as used herein, refers to, with respect to an agent, residues or motifs in an agent that are designed to interact with particular target residues in a target polypeptide, or with respect to a target polypeptide, residues in a target polypeptide that interact with particular motifs (e.g., aromatic groups, amino acid residues, etc.) of an agent. Specifically, interaction residues and motifs of various agents are selected and arranged within the agents so that they will be displayed in three dimensional space within a predetermined distance (or volume) of identified target residues (e.g., upon binding, docking or other interaction assays). In many embodiments, interaction residues are direct-binding residues.

[0094] “Improved,” “increased” or “reduced”: As used herein, these terms, or grammatically comparable comparative terms, indicate values that are relative to a comparable reference measurement. For example, in some embodiments, an assessed value achieved with an agent of interest may be “improved” relative to that obtained with a comparable reference agent. Alternatively or additionally, in some embodiments, an assessed value achieved in a subject or system of interest may be “improved” relative to that obtained in the same subject or system under different conditions (e.g., prior to or after an event such as administration of an agent of interest), or in a different, comparable subject (e.g., in a comparable subject or system that differs from the subject or system of interest in presence of one or more indicators of a particular disease, disorder or condition of interest, or in prior exposure to a condition or agent, etc). In some embodiments, comparative terms refer to statistically relevant differences (e.g., that are of a prevalence and/or magnitude sufficient to achieve statistical relevance). Those skilled in the art will be aware, or will readily be able to determine, in a given context, a degree and/or prevalence of difference that is required or sufficient to achieve such statistical significance.

[0095] Partially unsaturated: As used herein, the term “partially unsaturated” refers to a moiety that includes at least one double or triple bond. The term “partially unsaturated” is intended to encompass groups having multiple sites of unsaturation, but is not intended to include aryl or heteroaryl moieties.

[0096] Peptide: The term “peptide” as used herein refers to a polypeptide. In some embodiments, a peptide is a polypeptide that is relatively short, for example having a length of less than about 100 amino acids, less than about 50 amino acids, less than about 40 amino acids less than about 30 amino acids, less than about 25 amino acids, less than about 20 amino acids, less than about 15 amino acids, or less than 10 amino acids.

[0097] Pharmaceutical composition: As used herein, the term “pharmaceutical composition” refers to an active agent, formulated together with one or more pharmaceutically acceptable carriers. In some embodiments, active agent is present in unit dose amount appropriate for administration in a therapeutic regimen that shows a statistically significant probability of achieving a predetermined therapeutic effect when administered to a relevant population. In some embodiments, pharmaceutical compositions may be specially formulated for administration in solid or liquid form, including those adapted for the following: oral administration, for example, drenches (aqueous or non-aqueous solutions or suspensions), tablets, e.g., those targeted for buccal, sublingual, and systemic absorption, boluses, powders, granules, pastes for application to the tongue; parenteral administration, for example, by subcutaneous, intramuscular, intravenous or epidural injection as, for example, a sterile solution or suspension, or sustained-release formulation; topical application, for example, as a cream, ointment, or a controlled-release patch or spray applied to the skin, lungs, or oral cavity; intravaginally or intrarectally, for example, as a pessary, cream, or foam; sublingually; ocularly; transdermally; or nasally, pulmonary, and to other mucosal surfaces.

[0098] Pharmaceutically acceptable: As used herein, the phrase “pharmaceutically acceptable” refers to those compounds, materials, compositions, and/or dosage forms which are, within the scope of sound medical judgment, suitable for use in contact with the tissues of human beings and animals without excessive toxicity, irritation, allergic response, or other problem or complication, commensurate with a reasonable benefit/risk ratio.

[0099] Pharmaceutically acceptable carrier: As used herein, the term “pharmaceutically acceptable carrier” means a pharmaceutically-acceptable material, composition or vehicle, such as a liquid or solid filler, diluent, excipient, or solvent encapsulating material, involved in carrying or transporting the subject compound from one organ, or portion of the body, to another organ, or portion of the body. Each carrier must be “acceptable” in the sense of being compatible with the other ingredients of the formulation and not injurious to the patient. Some examples of materials which can serve as pharmaceutically-acceptable carriers include: sugars, such as lactose, glucose and sucrose; starches, such as corn starch and potato starch; cellulose, and its derivatives, such as sodium carboxymethyl cellulose, ethyl cellulose and cellulose acetate; powdered tragacanth; malt; gelatin; talc; excipients, such as cocoa butter and suppository waxes; oils, such as peanut oil, cottonseed oil, safflower oil, sesame oil, olive oil, corn oil and soybean oil; glycols, such as propylene glycol; polyols, such as glycerin, sorbitol, mannitol and polyethylene glycol; esters, such as ethyl oleate and ethyl laurate; agar; buffering agents, such as magnesium hydroxide and aluminum hydroxide; alginic acid; pyrogen-free water; isotonic saline; RingeR's solution; ethyl alcohol; pH buffered solutions; polyesters, polycarbonates and/or polyanhydrides; and other non-toxic compatible substances employed in pharmaceutical formulations.

[0100] Pharmaceutically acceptable salt: The term “pharmaceutically acceptable salt”, as used herein, refers to salts of such compounds that are appropriate for use in pharmaceutical contexts, i.e., salts which are, within the scope of sound medical judgment, suitable for use in contact with the tissues of humans and lower animals without undue toxicity, irritation, allergic response and the like, and are commensurate with a reasonable benefit/risk ratio. Pharmaceutically acceptable salts are well known. For example, S. M. Berge, et al. describes pharmaceutically acceptable salts in detail in J. Pharmaceutical Sciences, 66: 1-19 (1977). In some embodiments, pharmaceutically acceptable salts include, but are not limited to, nontoxic acid addition salts, which are salts of an amino group formed with inorganic acids such as hydrochloric acid, hydrobromic acid, phosphoric acid, sulfuric acid and perchloric acid or with organic acids such as acetic acid, maleic acid, tartaric acid, citric acid, succinic acid or malonic acid or by using other known methods such as ion exchange. In some embodiments, pharmaceutically acceptable salts include, but are not limited to, adipate, alginate, ascorbate, aspartate, benzenesulfonate, benzoate, bisulfate, borate, butyrate, camphorate, camphorsulfonate, citrate, cyclopentanepropionate, digluconate, dodecylsulfate, ethanesulfonate, formate, fumarate, glucoheptonate, glycerophosphate, gluconate, hemisulfate, heptanoate, hexanoate, hydroiodide, 2-hydroxy-ethanesulfonate, lactobionate, lactate, laurate, lauryl sulfate, malate, maleate, malonate, methanesulfonate, 2-naphthalenesulfonate, nicotinate, nitrate, oleate, oxalate, palmitate, pamoate, pectinate, persulfate, 3-phenylpropionate, phosphate, picrate, pivalate, propionate, stearate, succinate, sulfate, tartrate, thiocyanate, p-toluenesulfonate, undecanoate, valerate salts, and the like. In some embodiments, pharmaceutically acceptable salts include, but are not limited to, nontoxic base addition salts, such as those formed by acidic groups of provided compounds with bases. Representative alkali or alkaline earth metal salts include salts of sodium, lithium, potassium, calcium, magnesium, and the like. In some embodiments, pharmaceutically acceptable salts are ammonium salts (e.g., —N(R)₃+). In some embodiments, pharmaceutically acceptable salts are sodium salts. In some embodiments, pharmaceutically acceptable salts include, when appropriate, nontoxic ammonium, quaternary ammonium, and amine cations formed using counterions such as halide, hydroxide, carboxylate, sulfate, phosphate, nitrate, alkyl having from 1 to 6 carbon atoms, sulfonate and aryl sulfonate.

[0101] Polypeptide: As used herein refers to any polymeric chain of amino acids. In some embodiments, a polypeptide has an amino acid sequence that occurs in nature. In some embodiments, a polypeptide has an amino acid sequence that does not occur in nature. In some embodiments, a polypeptide has an amino acid sequence that is engineered in that it is designed and/or produced through action of the hand of man. In some embodiments, a polypeptide may comprise or consist of natural amino acids, non-natural amino acids, or both. In some embodiments, a polypeptide may comprise or consist of only natural amino acids or only non-natural amino acids. In some embodiments, a polypeptide may comprise D-amino acids, L-amino acids, or both. In some embodiments, a polypeptide may comprise only D-amino acids. In some embodiments, a polypeptide may comprise only L-amino acids. In some embodiments, a polypeptide may include one or more pendant groups or other modifications, e.g., modifying or attached to one or more amino acid side chains, at the polypeptide's N-terminus, at the polypeptide's C-terminus, or any combination thereof. In some embodiments, such pendant groups or modifications may be selected from the group consisting of acetylation, amidation, lipidation, methylation, pegylation, etc., including combinations thereof. In some embodiments, a polypeptide may be cyclic, and/or may comprise a cyclic portion. In some embodiments, a polypeptide is not cyclic and/or does not comprise any cyclic portion. In some embodiments, a polypeptide is linear. In some embodiments, a polypeptide may be or comprise a stapled polypeptide. In some embodiments, the term “polypeptide” may be appended to a name of a reference polypeptide, activity, or structure; in such instances it is used herein to refer to polypeptides that share the relevant activity or structure and thus can be considered to be members of the same class or family of polypeptides. For each such class, the present specification provides and/or those skilled in the art will be aware of exemplary polypeptides within the class whose amino acid sequences and/or functions are known; in some embodiments, such exemplary polypeptides are reference polypeptides for the polypeptide class or family. In some embodiments, a member of a polypeptide class or family shows significant sequence homology or identity with, shares a common sequence motif (e.g., a characteristic sequence element) with, and/or shares a common activity (in some embodiments at a comparable level or within a designated range) with a reference polypeptide of the class; in some embodiments with all polypeptides within the class). For example, in some embodiments, a member polypeptide shows an overall degree of sequence homology or identity with a reference polypeptide that is at least about 30-40%, and is often greater than about 50%, 60%, 70%, 80%, 90%, 91%, 92%, 93%, 94%, 95%, 96%, 97%, 98%, 99% or more and/or includes at least one region (e.g., a conserved region that may in some embodiments be or comprise a characteristic sequence element) that shows very high sequence identity, often greater than 90% or even 95%, 96%, 97%, 98%, or 99%. Such a conserved region usually encompasses at least 3-4 and often up to 20 or more amino acids; in some embodiments, a conserved region encompasses at least one stretch of at least 2, 3, 4, 5, 6, 7, 8, 9, 10, 11, 12, 13, 14, 15 or more contiguous amino acids. In some embodiments, a relevant polypeptide may comprise or consist of a fragment of a parent polypeptide. In some embodiments, a useful polypeptide as may comprise or consist of a plurality of fragments, each of which is found in the same parent polypeptide in a different spatial arrangement relative to one another than is found in the polypeptide of interest (e.g., fragments that are directly linked in the parent may be spatially separated in the polypeptide of interest or vice versa, and/or fragments may be present in a different order in the polypeptide of interest than in the parent), so that the polypeptide of interest is a derivative of its parent polypeptide.

[0102] Prevent or prevention: as used herein when used in connection with the occurrence of a disease, disorder, and/or condition, refers to reducing the risk of developing the disease, disorder and/or condition and/or to delaying onset of one or more characteristics or symptoms of the disease, disorder or condition. Prevention may be considered complete when onset of a disease, disorder or condition has been delayed for a predefined period of time.

[0103] Protecting group: The term “protecting group,” as used herein, is well known in the art and includes those described in detail in Protecting Groups in Organic Synthesis, T. W. Greene and P. G. M. Wuts, 3^{rd} edition, John Wiley & Sons, 1999, the entirety of which is incorporated herein by reference. Also included are those protecting groups specially adapted for nucleoside and nucleotide chemistry described in Current Protocols in Nucleic Acid Chemistry, edited by Serge L. Beaucage et al. June 2012, the entirety of Chapter 2 is incorporated herein by reference. Suitable amino-protecting groups include methyl carbamate, ethyl carbamante, 9-fluorenylmethyl carbamate (Fmoc), 9-(2-sulfo)fluorenylmethyl carbamate, 9-(2,7-dibromo)fluoroenylmethyl carbamate, 2,7-di-t-butyl-[9-(10,10-dioxo-10,10,10,10-tetrahydrothioxanthyl)]methyl carbamate (DBD-Tmoc), 4-methoxyphenacyl carbamate (Phenoc), 2,2,2-trichloroethyl carbamate (Troc), 2-trimethylsilylethyl carbamate (Teoc), 2-phenylethyl carbamate (hZ), 1-(1-adamantyl)-1-methylethyl carbamate (Adpoc), 1,1-dimethyl-2-haloethyl carbamate, 1,1-dimethyl-2,2-dibromoethyl carbamate (DB-t-BOC), 1,1-dimethyl-2,2,2-trichloroethyl carbamate (TCBOC), 1-methyl-1-(4-biphenylyl)ethyl carbamate (Bpoc), 1-(3,5-di-t-butylphenyl)-1-methylethyl carbamate (t-Bumeoc), 2-(2′- and 4′-pyridyl)ethyl carbamate (Pyoc), 2-(N,N-dicyclohexylcarboxamido)ethyl carbamate, t-butyl carbamate (BOC), 1-adamantyl carbamate (Adoc), vinyl carbamate (Voc), allyl carbamate (Alloc), 1-isopropylallyl carbamate (Ipaoc), cinnamyl carbamate (Coc), 4-nitrocinnamyl carbamate (Noc), 8-quinolyl carbamate, N-hydroxypiperidinyl carbamate, alkyldithio carbamate, benzyl carbamate (Cbz), p-methoxybenzyl carbamate (Moz), p-nitobenzyl carbamate, p-bromobenzyl carbamate, p-chlorobenzyl carbamate, 2,4-dichlorobenzyl carbamate, 4-methylsulfinylbenzyl carbamate (Msz), 9-anthrylmethyl carbamate, diphenylmethyl carbamate, 2-methylthioethyl carbamate, 2-methylsulfonylethyl carbamate, 2-(p-toluenesulfonyl)ethyl carbamate, [2-(1,3-dithianyl)]methyl carbamate (Dmoc), 4-methylthiophenyl carbamate (Mtpc), 2,4-dimethylthiophenyl carbamate (Bmpc), 2-phosphonioethyl carbamate (Peoc), 2-triphenylphosphonioisopropyl carbamate (Ppoc), 1,1-dimethyl-2-cyanoethyl carbamate, m-chloro-p-acyloxybenzyl carbamate, p-(dihydroxyboryl)benzyl carbamate, 5-benzisoxazolylmethyl carbamate, 2-(trifluoromethyl)-6-chromonylmethyl carbamate (Tcroc), m-nitrophenyl carbamate, 3,5-dimethoxybenzyl carbamate, o-nitrobenzyl carbamate, 3,4-dimethoxy-6-nitrobenzyl carbamate, phenyl(o-nitrophenyl)methyl carbamate, phenothiazinyl-(10)-carbonyl derivative, N′-p-toluenesulfonylaminocarbonyl derivative, N′-phenylaminothiocarbonyl derivative, t-amyl carbamate, S-benzyl thiocarbamate, p-cyanobenzyl carbamate, cyclobutyl carbamate, cyclohexyl carbamate, cyclopentyl carbamate, cyclopropylmethyl carbamate, p-decyloxybenzyl carbamate, 2,2-dimethoxycarbonylvinyl carbamate, o-(N,N-dimethylcarboxamido)benzyl carbamate, 1,1-dimethyl-3-(N,N-dimethylcarboxamido)propyl carbamate, 1,1-dimethylpropynyl carbamate, di(2-pyridyl)methyl carbamate, 2-furanylmethyl carbamate, 2-iodoethyl carbamate, isoborynl carbamate, isobutyl carbamate, isonicotinyl carbamate, p-(p′-methoxyphenylazo)benzyl carbamate, 1-methylcyclobutyl carbamate, 1-methylcyclohexyl carbamate, 1-methyl-1-cyclopropylmethyl carbamate, 1-methyl-1-(3,5-dimethoxyphenyl)ethyl carbamate, 1-methyl-1-(p-phenylazophenyl)ethyl carbamate, 1-methyl-1-phenylethyl carbamate, 1-methyl-1-(4-pyridyl)ethyl carbamate, phenyl carbamate, p-(phenylazo)benzyl carbamate, 2,4,6-tri-t-butylphenyl carbamate, 4-(trimethylammonium)benzyl carbamate, 2,4,6-trimethylbenzyl carbamate, formamide, acetamide, chloroacetamide, trichloroacetamide, trifluoroacetamide, phenylacetamide, 3-phenylpropanamide, picolinamide, 3-pyridylcarboxamide, N-benzoylphenylalanyl derivative, benzamide, p-phenylbenzamide, o-nitophenylacetamide, o-nitrophenoxyacetamide, acetoacetamide, (N′-dithiobenzyloxycarbonylamino)acetamide, 3-(p-hydroxyphenyl)propanamide, 3-(o-nitrophenyl)propanamide, 2-methyl-2-(o-nitrophenoxy)propanamide, 2-methyl-2-(o-phenylazophenoxy)propanamide, 4-chlorobutanamide, 3-methyl-3-nitrobutanamide, o-nitrocinnamide, N-acetylmethionine derivative, o-nitrobenzamide, o-(benzoyloxymethyl)benzamide, 4,5-diphenyl-3-oxazolin-2-one, N-phthalimide, N-dithiasuccinimide (Dts), N-2,3-diphenylmaleimide, N-2,5-dimethylpyrrole, N-1,1,4,4-tetramethyldisilylazacyclopentane adduct (STABASE), 5-substituted 1,3-dimethyl-1,3,5-triazacyclohexan-2-one, 5-substituted 1,3-dibenzyl-1,3,5-triazacyclohexan-2-one, 1-substituted 3,5-dinitro-4-pyridone, N-methylamine, N-allylamine, N-[2-(trimethylsilyl)ethoxy]methylamine (SEM), N-3-acetoxypropylamine, N-(1-isopropyl-4-nitro-2-oxo-3-pyroolin-3-yl)amine, quaternary ammonium salts, N-benzylamine, N-di(4-methoxyphenyl)methylamine, N-5-dibenzosuberylamine, N-triphenylmethylamine (Tr), N-[(4-methoxyphenyl)diphenylmethyl]amine (MMTr), N-9-phenylfluorenylamine (PhF), N-2,7-dichloro-9-fluorenylmethyleneamine, N-ferrocenylmethylamino (Fcm), N-2-picolylamino N′-oxide, N-1,1-dimethylthiomethyleneamine, N-benzylideneamine, N-p-methoxybenzylideneamine, N-diphenylmethyleneamine, N-[(2-pyridyl)mesityl]methyleneamine, N—(N′,N′-dimethylaminomethylene)amine, N,N′-isopropylidenediamine, N-p-nitrobenzylideneamine, N-salicylideneamine, N-5-chlorosalicylideneamine, N-(5-chloro-2-hydroxyphenyl)phenylmethyleneamine, N-cyclohexylideneamine, N-(5,5-dimethyl-3-oxo-1-cyclohexenyl)amine, N-borane derivative, N-diphenylborinic acid derivative, N-[phenyl(pentacarbonylchromium- or tungsten)carbonyl]amine, N-copper chelate, N-zinc chelate, N-nitroamine, N-nitrosoamine, amine N-oxide, diphenylphosphinamide (Dpp), dimethylthiophosphinamide (Mpt), diphenylthiophosphinamide (Ppt), dialkyl phosphoramidates, dibenzyl phosphoramidate, diphenyl phosphoramidate, benzenesulfenamide, o-nitrobenzenesulfenamide (Nps), 2,4-dinitrobenzenesulfenamide, pentachlorobenzenesulfenamide, 2-nitro-4-methoxybenzenesulfenamide, triphenylmethylsulfenamide, 3-nitropyridinesulfenamide (Npys), p-toluenesulfonamide (Ts), benzenesulfonamide, 2,3,6,-trimethyl-4-methoxybenzenesulfonamide (Mtr), 2,4,6-trimethoxybenzenesulfonamide (Mtb), 2,6-dimethyl-4-methoxybenzenesulfonamide (Pme), 2,3,5,6-tetramethyl-4-methoxybenzenesulfonamide (Mte), 4-methoxybenzenesulfonamide (Mbs), 2,4,6-trimethylbenzenesulfonamide (Mts), 2,6-dimethoxy-4-methylbenzenesulfonamide (iMds), 2,2,5,7,8-pentamethylchroman-6-sulfonamide (Pmc), methanesulfonamide (Ms), (3-trimethylsilylethanesulfonamide (SES), 9-anthracenesulfonamide, 4-(4′,8′-dimethoxynaphthylmethyl)benzenesulfonamide (DNMBS), benzylsulfonamide, trifluoromethylsulfonamide, and phenacylsulfonamide.

[0104] In some embodiments, suitable mono-protected amines include, but are not limited to, aralkylamines, carbamates, allyl amines, amides, and the like. Examples of suitable mono-protected amino moieties include t-butyloxycarbonylamino (—NHBOC), ethyloxycarbonylamino, methyloxycarbonylamino, trichloroethyloxycarbonylamino, allyloxycarbonylamino (—NHAlloc), benzyloxocarbonylamino (—NHCBZ), allylamino, benzylamino (—NHBn), fluorenylmethylcarbonyl (—NHFmoc), formamido, acetamido, chloroacetamido, dichloroacetamido, trichloroacetamido, phenylacetamido, trifluoroacetamido, benzamido, t-butyldiphenylsilyl, and the like. In some embodiments, suitable di-protected amines include amines that are substituted with two substituents independently selected from those described above as mono-protected amines, and further include cyclic imides, such as phthalimide, maleimide, succinimide, and the like. In some embodiments, suitable di-protected amines include pyrroles and the like, 2,2,5,5-tetramethyl-[1,2,5]azadisilolidine and the like, and azide.

[0105] Suitably protected carboxylic acids further include, but are not limited to, silyl-, alkyl-, alkenyl-, aryl-, and arylalkyl-protected carboxylic acids. Examples of suitable silyl groups include trimethylsilyl, triethylsilyl, t-butyldimethylsilyl, t-butyldiphenylsilyl, triisopropylsilyl, and the like. Examples of suitable alkyl groups include methyl, benzyl, p-methoxybenzyl, 3,4-dimethoxybenzyl, trityl, t-butyl, tetrahydropyran-2-yl. Examples of suitable alkenyl groups include allyl. Examples of suitable aryl groups include optionally substituted phenyl, biphenyl, or naphthyl. Examples of suitable arylalkyl groups include optionally substituted benzyl (e.g., p-methoxybenzyl (MPM), 3,4-dimethoxybenzyl, O-nitrobenzyl, p-nitrobenzyl, p-halobenzyl, 2,6-dichlorobenzyl, p-cyanobenzyl), and 2- and 4-picolyl. In some embodiments, suitable protected carboxylic acids include, but are not limited to, optionally substituted C₁₋₆ aliphatic esters, optionally substituted aryl esters, silyl esters, activated esters, amides, hydrazides, and the like. Examples of such ester groups include methyl, ethyl, propyl, isopropyl, butyl, isobutyl, benzyl, and phenyl ester, wherein each group is optionally substituted. Additional suitable protected carboxylic acids include oxazolines and ortho esters.

[0106] Suitable hydroxyl protecting groups include methyl, methoxylmethyl (MOM), methylthiomethyl (MTM), t-butylthiomethyl, (phenyldimethylsilyl)methoxymethyl (SMOM), benzyloxymethyl (BOM), p-methoxybenzyloxymethyl (PMBM), (4-methoxyphenoxy)methyl (p-AOM), guaiacolmethyl (GUM), t-butoxymethyl, 4-pentenyloxymethyl (POM), siloxymethyl, 2-methoxyethoxymethyl (MEM), 2,2,2-trichloroethoxymethyl, bis(2-chloroethoxy)methyl, 2-(trimethylsilyl)ethoxymethyl (SEMOR), tetrahydropyranyl (THP), 3-bromotetrahydropyranyl, tetrahydrothiopyranyl, 1-methoxycyclohexyl, 4-methoxytetrahydropyranyl (MTHP), 4-methoxytetrahydrothiopyranyl, 4-methoxytetrahydrothiopyranyl S,S-dioxide, 1-[(2-chloro-4-methyl)phenyl]-4-methoxypiperidin-4-yl (CTMP), 1,4-dioxan-2-yl, tetrahydrofuranyl, tetrahydrothiofuranyl, 2,3,3a,4,5,6,7,7a-octahydro-7,8,8-trimethyl-4,7-methanobenzofuran-2-yl, 1-ethoxyethyl, 1-(2-chloroethoxy)ethyl, 1-methyl-1-methoxyethyl, 1-methyl-1-benzyloxyethyl, 1-methyl-1-benzyloxy-2-fluoroethyl, 2,2,2-trichloroethyl, 2-trimethylsilylethyl, 2-(phenylselenyl)ethyl, t-butyl, allyl, p-chlorophenyl, p-methoxyphenyl, 2,4-dinitrophenyl, benzyl, p-methoxybenzyl, 3,4-dimethoxybenzyl, o-nitrobenzyl, p-nitrobenzyl, p-halobenzyl, 2,6-dichlorobenzyl, p-cyanobenzyl, p-phenylbenzyl, 2-picolyl, 4-picolyl, 3-methyl-2-picolyl N-oxido, diphenylmethyl, p,p′-dinitrobenzhydryl, 5-dibenzosuberyl, triphenylmethyl, a-naphthyldiphenylmethyl, p-methoxyphenyldiphenylmethyl, di(p-methoxyphenyl)phenylmethyl, tri(p-methoxyphenyl)methyl, 4-(4′-bromophenacyloxyphenyl)diphenylmethyl, 4,4′,4″-tris(4,5-dichlorophthalimidophenyl)methyl, 4,4′,4″-tris(levulinoyloxyphenyl)methyl, 4,4′,4″-tris(benzoyloxyphenyl)methyl, 3-(imidazol-1-yl)bis(4′,4″-dimethoxyphenyl)methyl, 1,1-bis(4-methoxyphenyl)-1′-pyrenylmethyl, 9-anthryl, 9-(9-phenyl)xanthenyl, 9-(9-phenyl-10-oxo)anthryl, 1,3-benzodithiolan-2-yl, benzisothiazolyl S,S-dioxido, trimethylsilyl (TMS), triethylsilyl (TES), triisopropylsilyl (TIPS), dimethylisopropylsilyl (IPDMS), diethylisopropylsilyl (DEIPS), dimethylthexylsilyl, t-butyldimethylsilyl (TBDMS), t-butyldiphenylsilyl (TBDPS), tribenzylsilyl, tri-p-xylylsilyl, triphenylsilyl, diphenylmethylsilyl (DPMS), t-butylmethoxyphenylsilyl (TBMPS), formate, benzoylformate, acetate, chloroacetate, dichloroacetate, trichloroacetate, trifluoroacetate, methoxyacetate, triphenylmethoxyacetate, phenoxyacetate, p-chlorophenoxyacetate, 3-phenylpropionate, 4-oxopentanoate (levulinate), 4,4-(ethylenedithio)pentanoate (levulinoyldithioacetal), pivaloate, adamantoate, crotonate, 4-methoxycrotonate, benzoate, p-phenylbenzoate, 2,4,6-trimethylbenzoate (mesitoate), alkyl methyl carbonate, 9-fluorenylmethyl carbonate (Fmoc), alkyl ethyl carbonate, alkyl 2,2,2-trichloroethyl carbonate (Troc), 2-(trimethylsilyl)ethyl carbonate (TMSEC), 2-(phenylsulfonyl) ethyl carbonate (Psec), 2-(triphenylphosphonio) ethyl carbonate (Peoc), alkyl isobutyl carbonate, alkyl vinyl carbonate alkyl allyl carbonate, alkyl p-nitrophenyl carbonate, alkyl benzyl carbonate, alkyl p-methoxybenzyl carbonate, alkyl 3,4-dimethoxybenzyl carbonate, alkyl o-nitrobenzyl carbonate, alkyl p-nitrobenzyl carbonate, alkyl S-benzyl thiocarbonate, 4-ethoxy-1-napththyl carbonate, methyl dithiocarbonate, 2-iodobenzoate, 4-azidobutyrate, 4-nitro-4-methylpentanoate, o-(dibromomethyl)benzoate, 2-formylbenzenesulfonate, 2-(methylthiomethoxy)ethyl, 4-(methylthiomethoxy)butyrate, 2-(methylthiomethoxymethyl)benzoate, 2,6-dichloro-4-methylphenoxyacetate, 2,6-dichloro-4-(1,1,3,3-tetramethylbutyl)phenoxyacetate, 2,4-bis(1,1-dimethylpropyl)phenoxyacetate, chlorodiphenylacetate, isobutyrate, monosuccinoate, (E)-2-methyl-2-butenoate, o-(methoxycarbonyl)benzoate, a-naphthoate, nitrate, alkyl N,N,N′,N′-tetramethylphosphorodiamidate, alkyl N-phenylcarbamate, borate, dimethylphosphinothioyl, alkyl 2,4-dinitrophenylsulfenate, sulfate, methanesulfonate (mesylate), benzylsulfonate, and tosylate (Ts). For protecting 1,2- or 1,3-diols, the protecting groups include methylene acetal, ethylidene acetal, 1-t-butylethylidene ketal, 1-phenylethylidene ketal, (4-methoxyphenyl)ethylidene acetal, 2,2,2-trichloroethylidene acetal, acetonide, cyclopentylidene ketal, cyclohexylidene ketal, cycloheptylidene ketal, benzylidene acetal, p-methoxybenzylidene acetal, 2,4-dimethoxybenzylidene ketal, 3,4-dimethoxybenzylidene acetal, 2-nitrobenzylidene acetal, methoxymethylene acetal, ethoxymethylene acetal, dimethoxymethylene ortho ester, 1-methoxyethylidene ortho ester, 1-ethoxyethylidine ortho ester, 1,2-dimethoxyethylidene ortho ester, a-methoxybenzylidene ortho ester, 1-(N,N-dimethylamino)ethylidene derivative, a-(N,N′-dimethylamino)benzylidene derivative, 2-oxacyclopentylidene ortho ester, di-t-butylsilylene group (DTBS), 1,3-(1,1,3,3-tetraisopropyldisiloxanylidene) derivative (TIPDS), tetra-t-butoxydisiloxane-1,3-diylidene derivative (TBDS), cyclic carbonates, cyclic boronates, ethyl boronate, and phenyl boronate.

[0107] In some embodiments, a hydroxyl protecting group is acetyl, t-butyl, tbutoxymethyl, methoxymethyl, tetrahydropyranyl, 1-ethoxyethyl, 1-(2-chloroethoxy)ethyl, 2-trimethylsilylethyl, p-chlorophenyl, 2,4-dinitrophenyl, benzyl, benzoyl, p-phenylbenzoyl, 2,6-dichlorobenzyl, diphenylmethyl, p-nitrobenzyl, triphenylmethyl (trityl), 4,4′-dimethoxytrityl, trimethylsilyl, triethylsilyl, t-butyldimethylsilyl, t-butyldiphenylsilyl, triphenylsilyl, triisopropylsilyl, benzoylformate, chloroacetyl, trichloroacetyl, trifiuoroacetyl, pivaloyl, 9-fluorenylmethyl carbonate, mesylate, tosylate, triflate, trityl, monomethoxytrityl (MMTr), 4,4′-dimethoxytrityl, (DMTr) and 4,4′,4″-trimethoxytrityl (TMTr), 2-cyanoethyl (CE or Cne), 2-(trimethylsilyl)ethyl (TSE), 2-(2-nitrophenyl)ethyl, 2-(4-cyanophenyl)ethyl 2-(4-nitrophenyl)ethyl (NPE), 2-(4-nitrophenylsulfonyl)ethyl, 3,5-dichlorophenyl, 2,4-dimethylphenyl, 2-nitrophenyl, 4-nitrophenyl, 2,4,6-trimethylphenyl, 2-(2-nitrophenyl)ethyl, butylthiocarbonyl, 4,4′,4″-tris(benzoyloxy)trityl, diphenylcarbamoyl, levulinyl, 2-(dibromomethyl)benzoyl (Dbmb), 2-(isopropylthiomethoxymethyl)benzoyl (Ptmt), 9-phenylxanthen-9-yl (pixyl) or 9-(p-methoxyphenyl)xanthine-9-yl (MOX). In some embodiments, each of the hydroxyl protecting groups is, independently selected from acetyl, benzyl, t-butyldimethylsilyl, t-butyldiphenylsilyl and 4,4′-dimethoxytrityl. In some embodiments, the hydroxyl protecting group is selected from the group consisting of trityl, monomethoxytrityl and 4,4′-dimethoxytrityl group. In some embodiments, a phosphorous linkage protecting group is a group attached to the phosphorous linkage (e.g., an internucleotidic linkage) throughout oligonucleotide synthesis. In some embodiments, a protecting group is attached to a sulfur atom of an phosphorothioate group. In some embodiments, a protecting group is attached to an oxygen atom of an internucleotide phosphorothioate linkage. In some embodiments, a protecting group is attached to an oxygen atom of the internucleotide phosphate linkage. In some embodiments a protecting group is 2-cyanoethyl (CE or Cne), 2-trimethylsilylethyl, 2-nitroethyl, 2-sulfonylethyl, methyl, benzyl, o-nitrobenzyl, 2-(p-nitrophenyl)ethyl (NPE or Npe), 2-phenylethyl, 3-(N-tert-butylcarboxamido)-1-propyl, 4-oxopentyl, 4-methylthio-1-butyl, 2-cyano-1,1-dimethylethyl, 4-N-methylaminobutyl, 3-(2-pyridyl)-1-propyl, 2-[N-methyl-N-(2-pyridyl)]aminoethyl, 2-(N-formyl,N-methyl)aminoethyl, or 4-[N-methyl-N-(2,2,2-trifluoroacetyl)amino]butyl.

[0108] Protected thiols are well known in the art and include those described in detail in Greene (1999). Suitable protected thiols further include, but are not limited to, disulfides, thioethers, silyl thioethers, thioesters, thiocarbonates, and thiocarbamates, and the like. Examples of such groups include, but are not limited to, alkyl thioethers, benzyl and substituted benzyl thioethers, triphenylmethyl thioethers, and trichloroethoxycarbonyl thioester, to name but a few.

[0109] Reference: As used herein describes a standard or control relative to which a comparison is performed. For example, in some embodiments, an agent, animal, individual, population, sample, sequence or value of interest is compared with a reference or control agent, animal, individual, population, sample, sequence or value. In some embodiments, a reference or control is tested and/or determined substantially simultaneously with the testing or determination of interest. In some embodiments, a reference or control is a historical reference or control, optionally embodied in a tangible medium. Typically, as would be understood by those skilled in the art, a reference or control is determined or characterized under comparable conditions or circumstances to those under assessment. Those skilled in the art will appreciate when sufficient similarities are present to justify reliance on and/or comparison to a particular possible reference or control.

[0110] Specificity: As is known in the art, “specificity” is a measure of the ability of a particular ligand (e.g., an agent) to distinguish its binding partner (e.g., beta-catenin) from other potential binding partners (e.g., another protein, another portion (e.g., domain) of beta-catenin.

[0111] Substitution: As described herein, compounds of the disclosure may contain optionally substituted and/or substituted moieties. In general, the term “substituted,” whether preceded by the term “optionally” or not, means that one or more hydrogens of the designated moiety are replaced with a suitable substituent. Unless otherwise indicated, an “optionally substituted” group may have a suitable substituent at each substitutable position of the group, and when more than one position in any given structure may be substituted with more than one substituent selected from a specified group, the substituent may be either the same or different at every position. Combinations of substituents envisioned by this disclosure are preferably those that result in the formation of stable or chemically feasible compounds. The term “stable,” as used herein, refers to compounds that are not substantially altered when subjected to conditions to allow for their production, detection, and, in certain embodiments, their recovery, purification, and use for one or more of the purposes disclosed herein. In some embodiments, example substituents are described below.

[0112] Suitable monovalent substituents are halogen; —(CH₂)₀₋₄R^{o}; —(CH₂)₀₋₄OR^{o}; —O(CH₂)₀₋₄R^{o}, —O—(CH₂)₀₋₄C(O)OR^{o}; —(CH₂)₀₋₄CH(OR^{o})₂; —(CH₂)₀₋₄Ph, which may be substituted with R^{o}; —(CH₂)₀₋₄O(CH₂)₀₋₁Ph which may be substituted with R^{o}; —CH═CHPh, which may be substituted with R^{o}; —(CH₂)₀₋₄O(CH₂)₀₋₁-pyridyl which may be substituted with R^{o}; —NO₂; —CN; —N₃; —(CH₂)₀₋₄N(R^{o})₂; —(CH₂)₀₋₄N(R^{o})C(O)R^{o}; —N(R^{o})C(S)R^{o}; —(CH₂)₀₋₄N(R^{o})C(O)N(R^{o})₂; —N(R^{o})C(S)N(R^{o})₂; —(CH₂)₀₋₄N(R^{o})C(O)OR^{o}; —N(R^{o})N(R^{o})C(O)R^{o}; —N(R^{o})N(R^{o})C(O)N(R^{o})₂; —N(R^{o})N(R^{o})C(O)OR^{o}; —(CH₂)₀₋₄C(O)R^{o}; —C(S)R^{o}; —(CH₂)₀₋₄C(O)OR^{o}; —(CH₂)₀₋₄C(O)SR^{o}; —(CH₂)₀₋₄C(O)OSi(R^{o})₃; —(CH₂)₀₋₄OC(O)R^{o}; —OC(O)(CH₂)₀₋₄SR^{o}, —SC(S)SR^{o}; —(CH₂)₀₋₄SC(O)R^{o}; —(CH₂)₀₋₄C(O)N(R^{o})₂; —C(S)N(R^{o})₂; —C(S)SR^{o}; —SC(S)SR^{o}, —(CH₂)₀₋₄OC(O)N(R^{o})₂; —C(O)N(OR^{o})R^{o}; —C(O)C(O)R^{o}; —C(O)CH₂C(O)R^{o}; —C(NOR^{o})R^{o}; —(CH₂)₀₋₄SSR^{o}; —(CH₂)₀₋₄S(O)₂R^{o}; —(CH₂)₀₋₄S(O)₂OR^{o}; —(CH₂)₀₋₄OS(O)₂R^{o}; —S(O)₂N(R^{o})₂; —(CH₂)₀₋₄S(O)R^{o}; —N(R^{o})S(O)₂N(R^{o})₂; —N(R^{o})S(O)₂R^{o}; —N(OR^{o})R^{o}; —C(NH)N(R^{o})₂; —Si(R^{o})₃; —OSi(R^{o})₃; —P(R^{o})₂; —P(OR^{o})₂; —OP(R^{o})₂; —OP(OR^{o})₂; —N(R^{o})P(R^{o})₂; —B(R^{o})₂; —OB(R^{o})₂; —P(O)(R^{o})₂; —OP(O)(R^{o})₂; —N(R^{o})P(O)(R^{o})₂; —(C₁₋₄ straight or branched alkylene)O—N(R^{o})₂; or —(C₁₋₄ straight or branched alkylene)C(O)O—N(R^{o})₂; wherein each R^{o} may be substituted as defined below and is independently hydrogen, C₁₋₂₀ aliphatic, C₁₋₂₀ heteroaliphatic having 1-5 heteroatoms independently selected from nitrogen, oxygen, sulfur, silicon and phosphorus, —CH₂—(C₆₋₁₄ aryl), —O(CH₂)₀₋₁(C₆₋₁₄ aryl), —CH₂-(5-14 membered heteroaryl ring), a 5-20 membered, monocyclic, bicyclic, or polycyclic, saturated, partially unsaturated or aryl ring having 0-5 heteroatoms independently selected from nitrogen, oxygen, sulfur, silicon and phosphorus, or, notwithstanding the definition above, two independent occurrences of R^{o}, taken together with their intervening atom(s), form a 5-20 membered, monocyclic, bicyclic, or polycyclic, saturated, partially unsaturated or aryl ring having 0-5 heteroatoms independently selected from nitrogen, oxygen, sulfur, silicon and phosphorus, which may be substituted as defined below.

[0113] Suitable monovalent substituents on R^{o} (or the ring formed by taking two independent occurrences of R^{o} together with their intervening atoms), are independently halogen, —(CH₂)₀₋₂R^{●}, -(haloR^{●}), —(CH₂)₀₋₂OH, —(CH₂)₀₋₂OR^{●}, —(CH₂)₀₋₂CH(OR^{●})₂; —O(haloR^{●}), —CN, —N₃, —(CH₂)₀₋₂C(O)R^{●}, —(CH₂)₀₋₂C(O)OH, —(CH₂)₀₋₂C(O)OR^{●}, —(CH₂)₀₋₂SR^{●}, —(CH₂)₀₋₂SH, —(CH₂)₀₋₂NH₂, —(CH₂)₀₋₂NHR^{●}, —(CH₂)₀₋₂NR^{●}₂, —NO₂, —SiR^{●}₃, —OSiR^{●}₃, —C(O)SR^{●}, —(C₁₋₄ straight or branched alkylene)C(O)OR^{●}, or —SSR^{●} wherein each R^{●} is unsubstituted or where preceded by “halo” is substituted only with one or more halogens, and is independently selected from C₁₋₄ aliphatic, —CH₂Ph, —O(CH₂)₀₋₁Ph, or a 5−6-membered saturated, partially unsaturated, or aryl ring having 0-4 heteroatoms independently selected from nitrogen, oxygen, and sulfur. Suitable divalent substituents on a saturated carbon atom of R^{o} include ═O and ═S.

[0114] Suitable divalent substituents are the following: ═O, ═S, ═NNR*₂, ═NNHC(O)R*, ═NNHC(O)OR*, ═NNHS(O)₂R*, ═NR*, ═NOR*, —O(C(R*₂))₂₋₃O—, or —S(C(R*₂))₂₋₃S—, wherein each independent occurrence of R* is selected from hydrogen, C₁₋₆ aliphatic which may be substituted as defined below, or an unsubstituted 5−6-membered saturated, partially unsaturated, or aryl ring having 0-4 heteroatoms independently selected from nitrogen, oxygen, and sulfur. Suitable divalent substituents that are bound to vicinal substitutable carbons of an “optionally substituted” group include: —O(CR*2)₂₋₃O—, wherein each independent occurrence of R* is selected from hydrogen, C₁₋₆ aliphatic which may be substituted as defined below, or an unsubstituted 5−6-membered saturated, partially unsaturated, or aryl ring having 0-4 heteroatoms independently selected from nitrogen, oxygen, and sulfur.

[0115] Suitable substituents on the aliphatic group of R* are halogen, —R^{●}, -(haloR^{●}), —OH, —OR*^{●}, —O(haloR^{●}), —CN, —C(O)OH, —C(O)OR^{●}, —NH₂, —NHR^{●}, —NR^{●}₂, or —NO₂, wherein each R^{●}is unsubstituted or where preceded by “halo” is substituted only with one or more halogens, and is independently C₁₋₄ aliphatic, —CH₂Ph, —O(CH₂)₀₋₁Ph, or a 5−6-membered saturated, partially unsaturated, or aryl ring having 0-4 heteroatoms independently selected from nitrogen, oxygen, and sulfur.

[0116] In some embodiments, suitable substituents on a substitutable nitrogen are —R^{†}, —NR^{†}₂, —C(O)R^{†}, —C(O)OR^{†}, —C(O)C(O)R^{†}, —C(O)CH₂C(O)R^{†}, —S(O)₂Rt, —S(O)₂NR^{†}₂, —C(S)NR^{†}₂, —C(NH)NR^{†}₂, or —N(R^{†})S(O)₂R^{†}; wherein each R^{†} is independently hydrogen, C₁₋₆ aliphatic which may be substituted as defined below, unsubstituted —OPh, or an unsubstituted 5−6-membered saturated, partially unsaturated, or aryl ring having 0-4 heteroatoms independently selected from nitrogen, oxygen, and sulfur, or, notwithstanding the definition above, two independent occurrences of RT, taken together with their intervening atom(s) form an unsubstituted 3-12-membered saturated, partially unsaturated, or aryl mono- or bicyclic ring having 0-4 heteroatoms independently selected from nitrogen, oxygen, and sulfur.

[0117] Suitable substituents on the aliphatic group of R^{†} are independently halogen, —R^{●}, -(haloR^{●}), —OH, —OR^{●}, —O(haloR^{●}), —CN, —C(O)OH, —C(O)OR^{●}, —NH₂, —NHR^{●}, —NR^{●}₂, or —NO₂, wherein each R^{●}is unsubstituted or where preceded by “halo” is substituted only with one or more halogens, and is independently C₁₋₄ aliphatic, —CH₂Ph, —O(CH₂)₀₋₁Ph, or a 5−6-membered saturated, partially unsaturated, or aryl ring having 0-4 heteroatoms independently selected from nitrogen, oxygen, and sulfur.

[0118] Subject: As used herein, the term “subject” or “test subject” refers to any organism to which a provided compound or composition is administered in accordance with the present disclosure e.g., for experimental, diagnostic, prophylactic, and/or therapeutic purposes. Typical subjects include animals (e.g., mammals such as mice, rats, rabbits, non-human primates, and humans; insects; worms; etc.) and plants. In some embodiments, a subject may be suffering from, and/or susceptible to a disease, disorder, and/or condition. In some embodiments, a subject is a human.

[0119] Susceptible to: An individual who is “susceptible to” a disease, disorder, and/or condition is one who has a higher risk of developing the disease, disorder, and/or condition than does a member of the general public. In some embodiments, an individual who is susceptible to a disease, disorder and/or condition may not have been diagnosed with the disease, disorder, and/or condition. In some embodiments, an individual who is susceptible to a disease, disorder, and/or condition may exhibit symptoms of the disease, disorder, and/or condition. In some embodiments, an individual who is susceptible to a disease, disorder, and/or condition may not exhibit symptoms of the disease, disorder, and/or condition. In some embodiments, an individual who is susceptible to a disease, disorder, and/or condition will develop the disease, disorder, and/or condition. In some embodiments, an individual who is susceptible to a disease, disorder, and/or condition will not develop the disease, disorder, and/or condition.

[0120] Target polypeptide: A “target polypeptide”, as that term is used herein, is a polypeptide with which an agent interacts. In some embodiments, a target polypeptide is a beta-catenin polypeptide. In some embodiments, a target polypeptide comprises, consists essentially of, or is a binding site of beta-catenin polypeptide.

[0121] Target residue: A “target residue”, as that term is used herein, is a residue within a target polypeptide with which an agent is designed to interact. For example, an agent may be characterized by particular interaction motifs (e.g., aromatic groups as described herein) and/or residues (e.g., amino acid residues comprising aromatic groups as described herein) selected and arranged (by virtue of being presented on the selected scaffold) to be within a certain predetermined distance (or volume) of a target residue. In some embodiments, a target residue is or comprises an amino acid residue.

[0122] Therapeutic agent: As used herein, the phrase “therapeutic agent” refers to an agent that, when administered to a subject, has a therapeutic effect and/or elicits a desired biological and/or pharmacological effect. In some embodiments, a therapeutic agent is any substance that can be used to alleviate, ameliorate, relieve, inhibit, prevent, delay onset of, reduce severity of, and/or reduce incidence of one or more symptoms or features of a disease, disorder, and/or condition.

[0123] Therapeutic regimen: A “therapeutic regimen”, as that term is used herein, refers to a dosing regimen whose administration across a relevant population may be correlated with a desired or beneficial therapeutic outcome.

[0124] Therapeutically effective amount: As used herein, the term “therapeutically effective amount” means an amount of a substance (e.g., a therapeutic agent, composition, and/or formulation) that elicits a desired biological response when administered as part of a therapeutic regimen. In some embodiments, a therapeutically effective amount of a substance is an amount that is sufficient, when administered to a subject suffering from or susceptible to a disease, disorder, and/or condition, to treat, diagnose, prevent, and/or delay the onset of the disease, disorder, and/or condition. As will be appreciated by those of ordinary skill in this art, the effective amount of a substance may vary depending on such factors as the desired biological endpoint, the substance to be delivered, the target cell or tissue, etc. For example, the effective amount of compound in a formulation to treat a disease, disorder, and/or condition is the amount that alleviates, ameliorates, relieves, inhibits, prevents, delays onset of, reduces severity of and/or reduces incidence of one or more symptoms or features of the disease, disorder, and/or condition. In some embodiments, a therapeutically effective amount is administered in a single dose; in some embodiments, multiple unit doses are required to deliver a therapeutically effective amount.

[0125] Treat: As used herein, the term “treat,” “treatment,” or “treating” refers to any method used to partially or completely alleviate, ameliorate, relieve, inhibit, prevent, delay onset of, reduce severity of, and/or reduce incidence of one or more symptoms or features of a disease, disorder, and/or condition. Treatment may be administered to a subject who does not exhibit signs of a disease, disorder, and/or condition. In some embodiments, treatment may be administered to a subject who exhibits only early signs of the disease, disorder, and/or condition, for example for the purpose of decreasing the risk of developing pathology associated with the disease, disorder, and/or condition.

[0126] Unit dose: The expression “unit dose” as used herein refers to an amount administered as a single dose and/or in a physically discrete unit of a pharmaceutical composition. In many embodiments, a unit dose contains a predetermined quantity of an active agent. In some embodiments, a unit dose contains an entire single dose of the agent. In some embodiments, more than one unit dose is administered to achieve a total single dose. In some embodiments, administration of multiple unit doses is required, or expected to be required, in order to achieve an intended effect. A unit dose may be, for example, a volume of liquid (e.g., an acceptable carrier) containing a predetermined quantity of one or more therapeutic agents, a predetermined amount of one or more therapeutic agents in solid form, a sustained release formulation or drug delivery device containing a predetermined amount of one or more therapeutic agents, etc. It will be appreciated that a unit dose may be present in a formulation that includes any of a variety of components in addition to the therapeutic agent(s). For example, acceptable carriers (e.g., pharmaceutically acceptable carriers), diluents, stabilizers, buffers, preservatives, etc., may be included as described infra. It will be appreciated by those skilled in the art, in many embodiments, a total appropriate daily dosage of a particular therapeutic agent may comprise a portion, or a plurality, of unit doses, and may be decided, for example, by the attending physician within the scope of sound medical judgment. In some embodiments, the specific effective dose level for any particular subject or organism may depend upon a variety of factors including the disorder being treated and the severity of the disorder; activity of specific active compound employed; specific composition employed; age, body weight, general health, sex and diet of the subject; time of administration, and rate of excretion of the specific active compound employed; duration of the treatment; drugs and/or additional therapies used in combination or coincidental with specific compound(s) employed, and like factors well known in the medical arts.

[0127] Unsaturated: The term “unsaturated” as used herein, means that a moiety has one or more units of unsaturation.

[0128] Unless otherwise specified, salts, such as pharmaceutically acceptable acid or base addition salts, stereoisomeric forms, and tautomeric forms, of provided compound are included.

[0129] As used herein in the present disclosure, unless otherwise clear from context, (i) the term “a” or “an” may be understood to mean “at least one”; (ii) the term “or” may be understood to mean “and/or”; (iii) the terms “comprising”, “comprise”, “including” (whether used with “not limited to” or not), and “include” (whether used with “not limited to” or not) may be understood to encompass itemized components or steps whether presented by themselves or together with one or more additional components or steps; (iv) the term “another” may be understood to mean at least an additional/second one or more; (v) the terms “about” and “approximately” may be understood to permit standard variation as would be understood by those of ordinary skill in the art; and (vi) where ranges are provided, endpoints are included.

### Stapled Peptides

[0130] In some embodiments, a provided agent is or comprises a peptide. In some embodiments, a provided agent is a peptide. In some embodiments, a peptide is a stapled peptide. In some embodiments, a provided agent is a stapled peptide. In some embodiments, a peptide is a stitched peptide. In some embodiments, a provided agent is a stitched peptide. In some embodiments, a stitched peptide comprises two or more staples, wherein two staples are bonded to the same peptide backbone atom. Stapled peptides as described herein are typically peptides in which two or more amino acids of a peptide chain are linked through connection of two peptide backbone atoms of the amino acid residues and, as is understood by those skilled in the art, the connection is not through the peptide backbone between the linked amino acid residues. In some embodiments, a stapled peptide comprises one or more staples. A staple as described herein is a linker that can link one amino acid residue to another amino acid residue through bonding to a peptide backbone atom of each of the amino acid residues and, as is understood by those skilled in the art, the connection through a staple is not through the peptide backbone between the linked amino acid residues. In some embodiments, a staple bonds to the peptide backbone by replacing one or more hydrogen and/or substituents (e.g., side chains, O, S, etc.) on peptide backbone atoms (e.g., C, N, etc.). In some embodiments, side chains form portions of staples. In some embodiments, a staple is bonded to two carbon backbone atoms, e.g., two alpha carbon atoms. In some embodiments, a staple comprises C(R′)₂ or N(R′), either individually or as part of a large moiety, wherein R′ is R and is taken together with another group attached to a backbone atom which can be R (e.g., R^{a3}) and their intervening atoms to form a ring as described herein (e.g., when PyrS2 is stapled in various peptides).

[0131] As will be appreciated by those of ordinary skill in the art, a variety of peptide stapling technologies are available, including both hydrocarbon-stapling and non-hydrocarbon-stapling technologies, and can be utilized in accordance with the present disclosure. Various technologies for stapled and stitched peptides, including various staples and/or methods for manufacturing are available and may be utilized in accordance with the present disclosure, e.g., those described in WO 2019/051327 and WO 2020/041270, the staples of each of which are incorporated herein by reference.

[0132] In some embodiments, a peptide, e.g., a stapled peptide, is or comprise a helical structure. In some embodiments, a peptide is a stapled peptide.

[0133] In some embodiments, a staple is a hydrocarbon staple. In some embodiments, a staple as described herein is a non-hydrocarbon staple. In some embodiments, a non-hydrocarbon staple comprises one or more chain heteroatoms wherein a chain of a staple is the shortest covalent connection within the staple from one end of the staple to the other end of the staple. In some embodiments, a non-hydrocarbon staple is or comprises at least one sulfur atom derived from an amino acid residue of a polypeptide. In some embodiments, a non-hydrocarbon staple comprises two sulfur atom derived from two different amino acid residues of a polypeptide. In some embodiments, anon-hydrocarbon staple comprises two sulfur atoms derived from two different cysteine residues of a polypeptide. In some embodiments, a staple is a cysteine staple. In some embodiments, a staple is a non-cysteine staple. In some embodiments, a non-hydrocarbon staple is a carbamate staple and comprises a carbamate moiety (e.g., —N(R′)—C(O)—O—) in its chain. In some embodiments, a non-hydrocarbon staple is an amino staple and comprises an amino group (e.g., —N(R′)—) in its chain. In some embodiments, a non-hydrocarbon staple is an ester staple and comprises an ester moiety (—C(O)—O—) in its chain. In some embodiments, a non-hydrocarbon staple is an amide staple and comprises an amide moiety (—C(O)—N(R′)—) in its chain. In some embodiments, a non-hydrocarbon staple is a sulfonamide staple and comprises a sulfonamide moiety (—S(O)₂—N(R′)—) in its chain. In some embodiments, a non-hydrocarbon staple is an ether staple and comprises an ether moiety (—O—) in its chain. In some embodiments, an amino group in an amino staple, e.g., (—N(R′)—) is not bonded to a carbon atom that additionally forms a double bond with a heteroatom (e.g., —C(═O), —C(═S), —C(═N—R′), etc.) so that it is not part of another nitrogen-containing group such as amide, carbamate, etc. In some embodiments, R′ of a carbamate moiety, amino group, amide moiety, sulfonamide moiety, or ether moiety is R, and is taken together with an R group attached to a backbone (e.g., R^{a3} when it is R) and their intervening atoms to form a ring as described herein. In some embodiments, R′ of a carbamate moiety or amino group is R, and is taken together with an R group attached to a backbone (e.g., R^{a3} when it is R) and their intervening atoms to form a ring as described herein.

[0134] In some embodiments, a staple comprises one or more amino groups, e.g., —N(R′)—, wherein each R′ is independently as described herein. In some embodiments, —N(R′)— bonds to two carbon atoms. In some embodiments, —N(R′)— bonds to two carbon atoms, wherein neither of the two carbon atoms are bond to any heteroatoms through a double bond. In some embodiments, —N(R′)— bonds to two sp3 carbon atoms. In some embodiments, a staple comprises one or more —C(O)—N(R′)— groups, wherein each R′ is independently as described herein. In some embodiments, a staple comprises one or more carbamate groups, e.g., one or more —(O)—C(O)—N(R′)—, wherein each R′ is independently as described herein. In some embodiments, R′ is —H. In some embodiments, R′ is optionally substituted C₁₋₆ aliphatic. In some embodiments, R′ is optionally substituted C₁₋₆ alkyl. In some embodiments, R′ is C₁₋₆ aliphatic. In some embodiments, R′ is C₁₋₆ alkyl. In some embodiments, R′ is methyl.

[0135] In some embodiments, a stapled peptide comprise one or more staples. In some embodiments, a stapled peptide comprises one and no more than one staple. In some embodiments, a stapled peptide comprises two and no more than two staples. In some embodiments, two staples of a stapled peptide bond to a common backbone atom. In some embodiments, two staples of a stapled peptide bond to a common backbone atom which is an alpha carbon atom of an amino acid residue.

[0136] In some embodiments, peptides, e.g., staple peptides, of the present disclosure is or comprises a helix structure. As those skilled in the art will appreciate, helixes can have various lengths. In some embodiments, lengths of helixes range from 5 to 30 amino acid residues. In some embodiments, a length of a helix is 5, 6, 7, 8, 9, 10, 11, 12, 13, 14, 15, 16, 17, 18, 19, or 20, or more, amino acid residues. In some embodiments, a length of a helix is 6 amino acid residues. In some embodiments, a length of a helix is 8 amino acid residues. In some embodiments, a length of a helix is 10 amino acid residues. In some embodiments, a length of a helix is 12 amino acid residues. In some embodiments, a length of a helix is 14 amino acid residues. In some embodiments, a length of a helix is 16 amino acid residues. In some embodiments, a length of a helix is 17 amino acid residues. In some embodiments, a length of a helix is 18 amino acid residues. In some embodiments, a length of a helix is 19 amino acid residues. In some embodiments, a length of a helix is 20 amino acid residues.

[0137] Amino acids stapled together can have various number of amino acid residues in between, e.g., 1-20, 1-15, 1-10, 1, 2, 3, 4, 5, 6, 7, 8, 9, or 10, etc. In some embodiments, a staple is (i, i+4) which means there are three amino acid residues between the two amino acids (at positions i and i+4, respectively) that bond to the staple (at positions i+1, i+2, i+3, respectively). In some embodiments, a staple is (i, i+3). In some embodiments, a staple is (i, i+5). In some embodiments, a staple is (i, i+6). In some embodiments, a staple is (i, i+7). In some embodiments, a staple is (i, i+8). In some embodiments, a stapled peptide comprises two staples, one is (i, i+3) and the other is (i, i+7). In some embodiments, a stapled peptide comprises two staples, one is (i, i+3) and the other is (i, i+4). In some embodiments, a stapled peptide comprises two staples, one is (i, i+4) and the other is (i, i+7). In some embodiments, a stapled peptide comprises two staples, one is (i, i+3) and the other is (i, i+3). In some embodiments, a stapled peptide comprises two staples, one is (i, i+4) and the other is (i, i+4). In some embodiments, a stapled peptide comprises two staples, one is (i, i+7) and the other is (i, i+7). In some embodiments, the two staples are bonded to a common backbone atom, e.g., an alpha carbon atom of an amino acid residue.

[0138] In some embodiments, a stapled peptide comprises a staple which staple is L^{s}, wherein L^{s} is -L^{s1}-L^{s2}-L^{s3}-, each of L^{s1}, L^{s2}, and L^{s3} is independently L, wherein each L is independently as described in the present disclosure. In some embodiments, a provided staple is L^{s}.

[0139] In some embodiments, L^{s1} comprises at least one —N(R′)—, wherein R′ is as described in the present disclosure. In some embodiments, the —N(R′)— is bonded to two carbon atoms, wherein neither of the two carbon atoms forms a double bond with a heteroatom. In some embodiments, the —N(R′)— is not bonded to —C(O)—. In some embodiments, the —N(R′)— is not bonded to —C(S)—. In some embodiments, the —N(R′)— is not bonded to —C(═NR′)—. In some embodiments, L^{s1} is -L′—N(R′)—, wherein L′ is optionally substituted bivalent C₁-C₁₉ aliphatic. In some embodiments, L^{s1} is -L′—N(CH₃)—, wherein L′ is optionally substituted bivalent C₁-C₁₉ aliphatic.

[0140] In some embodiments, R′ is optionally substituted C₁₋₆ alkyl. In some embodiments, R′ is C₁₋₆ alkyl. In some embodiments, R′ is methyl. In some embodiments, the peptide backbone atom to which L^{s1} is bonded is also bonded to R¹, and R′ and R1 are both R and are taken together with their intervene atoms to form an optionally substituted ring as described in the present disclosure. In some embodiments, a formed ring has no additional ring heteroatoms in addition to the nitrogen atom to which R′ is bonded. In some embodiments, a formed ring is 3-membered. In some embodiments, a formed ring is 4-membered. In some embodiments, a formed ring is 5-membered. In some embodiments, a formed ring is 6-membered.

[0141] In some embodiments, L′ is optionally substituted bivalent C₁-C₂₀ aliphatic. In some embodiments, L′ is optionally substituted bivalent C₁-C₁₉ aliphatic. In some embodiments, L′ is optionally substituted bivalent C₁-C₁₅ aliphatic. In some embodiments, L′ is optionally substituted bivalent C₁-C₁₀ aliphatic. In some embodiments, L′ is optionally substituted bivalent C₁-C₉ aliphatic. In some embodiments, L′ is optionally substituted bivalent C₁-C₅ aliphatic. In some embodiments, L′ is optionally substituted bivalent C₁-C₇ aliphatic. In some embodiments, L′ is optionally substituted bivalent C₁-C₆ aliphatic. In some embodiments, L′ is optionally substituted bivalent C₁-C₅ aliphatic. In some embodiments, L′ is optionally substituted bivalent C₁-C₄ aliphatic. In some embodiments, L′ is optionally substituted alkylene. In some embodiments, L′ is optionally substituted alkenylene. In some embodiments, L′ is unsubstituted alkylene. In some embodiments, L′ is —CH₂—. In some embodiments, L′ is —(CH₂)₂—. In some embodiments, L′ is —(CH₂)₃—. In some embodiments, L′ is —(CH₂)₄—. In some embodiments, L′ is —(CH₂)₅—. In some embodiments, L′ is —(CH₂)₆—. In some embodiments, L′ is —(CH₂)₇—. In some embodiments, L′ is —(CH₂)₈—. In some embodiments, L′ is bonded to a peptide backbone atom. In some embodiments, L′ is optionally substituted alkenylene. In some embodiments, L′ is unsubstituted alkenylene. In some embodiments, L′ is —CH₂—CH═CH—CH₂—.

[0142] In some embodiments, L′ is optionally substituted phenylene.

[0143] In some embodiments, L^{s1} comprises at least one —N(R′)C(O)—, wherein R′ is as described in the present disclosure. In some embodiments, L^{s1} is -L′—N(R′)C(O)—, wherein each of L′ and R′ is independently as described in the present disclosure. In some embodiments, L^{s1} is -L′—N(CH₃)C(O)—, wherein L′ is independently as described in the present disclosure.

[0144] In some embodiments, L^{s1} comprises at least one —C(O)O—. In some embodiments, L^{s1} comprises at least one —C(O)O—. In some embodiments, L^{s1} is -L′-C(O)O— or -L′—OC(O)—, wherein each L′ is independently as described in the present disclosure. In some embodiments, L^{s1} is -L′-C(O)O—, wherein each L′ is independently as described in the present disclosure. In some embodiments, L^{s1} is -L′—OC(O)—, wherein each L′ is independently as described in the present disclosure.

[0145] In some embodiments, L^{s1} comprises at least one —S(O)₂—N(R′)—, wherein R′ is as described in the present disclosure. In some embodiments, L^{s1} comprises at least one —S(O)₂—N(R′)—, wherein R′ is as described in the present disclosure. In some embodiments, L^{s1} is -L′—N(R′)—S(O)₂— or -L′-S(O)₂—N(R′)—, wherein each of L′ and R′ is independently as described in the present disclosure. In some embodiments, L^{s1} is -L′—N(R′)—S(O)₂—, wherein each of L′ and R′ is independently as described in the present disclosure. In some embodiments, L^{s1} is -L′-S(O)₂—N(R′)—, wherein each of L′ and R′ is independently as described in the present disclosure. In some embodiments, L^{s1} is -L′—N(CH₃)—S(O)₂— or -L′-S(O)₂—N(CH₃)—, wherein each L′ is independently as described in the present disclosure. In some embodiments, L^{s1} is -L′—N(CH₃)—S(O)₂—, wherein L′ is as described in the present disclosure. In some embodiments, L^{s1} is -L′-S(O)₂—N(CH₃)—, wherein L′ is as described in the present disclosure.

[0146] In some embodiments, L^{s1} comprises at least one —O—. In some embodiments, L^{s1} is -L′—O—, wherein L′ is independently as described in the present disclosure.

[0147] In some embodiments, L^{s1} is a covalent bond.

[0148] In some embodiments, L^{s1} is L′, wherein L′ is as described in the present disclosure.

[0149] In some embodiments, L^{s2} is L, wherein L is as described in the present disclosure. In some embodiments, L^{s2} is L′, wherein L′ is as described in the present disclosure. In some embodiments, L^{s2} comprises —CH₂—CH═CH—CH₂—. In some embodiments, L^{s2} is —CH₂—CH═CH—CH₂—. In some embodiments, L^{s2} comprises —(CH₂)₄—. In some embodiments, L^{s2} is —(CH₂)₄—.

[0150] In some embodiments, L^{s3} comprises at least one —N(R′)—, wherein R′ is as described in the present disclosure. In some embodiments, the —N(R′)— is bonded to two carbon atoms, wherein neither of the two carbon atoms forms a double bond with a heteroatom. In some embodiments, the —N(R′)— is not bonded to —C(O)—. In some embodiments, the —N(R′)— is not bonded to —C(S)—. In some embodiments, the —N(R′)— is not bonded to —C(═NR′)—. In some embodiments, L^{s3} is -L′—N(R′)—, wherein L′ is optionally substituted bivalent C₁-C₁₉ aliphatic. In some embodiments, L^{s3} is -L′—N(CH₃)—, wherein L′ is optionally substituted bivalent C₁-C₁₉ aliphatic.

[0151] In some embodiments, L^{s3} comprises at least one —N(R′)C(O)—, wherein R′ is as described in the present disclosure. In some embodiments, L^{s3} is -L′—N(R′)C(O)—, wherein each of L′ and R′ is independently as described in the present disclosure. In some embodiments, L^{s3} is -L′—N(CH₃)C(O)—, wherein L′ is independently as described in the present disclosure.

[0152] In some embodiments, L^{s3} comprises at least one —C(O)O—. In some embodiments, L^{s3} comprises at least one —C(O)O—. In some embodiments, L^{s3} is -L′-C(O)O— or -L′—OC(O)—, wherein each L′ is independently as described in the present disclosure. In some embodiments, L^{s3} is -L′-C(O)O—, wherein each L′ is independently as described in the present disclosure. In some embodiments, L^{s3} is -L′—OC(O)—, wherein each L′ is independently as described in the present disclosure.

[0153] In some embodiments, L^{s3} comprises at least one —S(O)₂—N(R′)—, wherein R′ is as described in the present disclosure. In some embodiments, L^{s3} comprises at least one —S(O)₂—N(R′)—, wherein R′ is as described in the present disclosure. In some embodiments, L^{s3} is -L′—N(R′)—S(O)₂— or -L′-S(O)₂—N(R′)—, wherein each of L′ and R′ is independently as described in the present disclosure. In some embodiments, L^{s3} is -L′—N(R′)—S(O)₂—, wherein each of L′ and R′ is independently as described in the present disclosure. In some embodiments, L^{s3} is -L′-S(O)₂—N(R′)—, wherein each of L′ and R′ is independently as described in the present disclosure. In some embodiments, L^{s3} is -L′—N(CH₃)—S(O)₂— or -L′-S(O)₂—N(CH₃)—, wherein each L′ is independently as described in the present disclosure. In some embodiments, L^{s3} is -L′—N(CH₃)—S(O)₂—, wherein L′ is as described in the present disclosure. In some embodiments, L^{s3} is -L′-S(O)₂—N(CH₃)—, wherein L′ is as described in the present disclosure.

[0154] In some embodiments, L^{s3} comprises at least one —O—. In some embodiments, L^{s3} is -L′—O—, wherein L′ is independently as described in the present disclosure.

[0155] In some embodiments, L^{s3} is L′, wherein L′ is as described in the present disclosure. In some embodiments, L^{s3} is optionally substituted alkylene. In some embodiments, L^{s3} is unsubstituted alkylene.

[0156] In some embodiments, L^{s} comprises at least one —N(R′)—, wherein R′ is as described in the present disclosure. In some embodiments, the —N(R′)— is bonded to two carbon atoms, wherein neither of the two carbon atoms forms a double bond with a heteroatom. In some embodiments, the —N(R′)— is not bonded to —C(O)—. In some embodiments, the —N(R′)— is not bonded to —C(S)—. In some embodiments, the —N(R′)— is not bonded to —C(═NR′)—. In some embodiments, L^{s} comprises at least one —N(R′)C(O)—, wherein R′ is as described in the present disclosure.

[0157] In some embodiments, L^{s}, L^{s1}, L^{s2}, and L^{s3} each independently and optionally comprise a R′ group, e.g., a R′ group in —C(R′)₂—, —N(R′)—, etc., and the R′ group is taken with a group (e.g., a group that can be R) attached to a backbone atom (e.g., R^{a1}, R^{a2}, R^{a3}, a R′ group of L^{a1} or L^{a2} (e.g., a R′ group in —C(R′)₂—, —N(R′)—, etc.), etc.) to form a double bond or an optionally substituted ring as two R groups can. In some embodiments, a formed ring is an optionally substituted 3-10 membered ring. In some embodiments, a formed ring is an optionally substituted 3-membered ring. In some embodiments, a formed ring is an optionally substituted 4-membered ring. In some embodiments, a formed ring is an optionally substituted 5-membered ring. In some embodiments, a formed ring is an optionally substituted 6-membered ring. In some embodiments, a formed ring is monocyclic. In some embodiments, a formed ring is saturated. In some embodiments, a formed ring is partially unsaturated. In some embodiments, a formed ring is aromatic. In some embodiments, a formed ring comprises one or more ring heteroatom (e.g., nitrogen). In some embodiments, a staple, or L^{s}, L^{s1}, L^{s2}, and/or L^{s3} comprises —N(R′)—, and the R′ is taken together with a group attached to a backbone atom to form an optionally substituted ring as described herein. In some embodiments, a staple, or L^{s}, L^{s1}, L^{s2}, and/or L^{s3} comprises —C(R′)₂—, and the R′ is taken together with a group attached to a backbone atom to form an optionally substituted ring as described herein.

[0158] In some embodiments, a staple, or L^{s}, L^{s1}, L^{s2}, and/or L^{s3} comprises portions of one or more amino acid side chains (e.g., a side chain other than its terminal ═CH₂).

[0159] As will be clear to those skilled in the art reading the present disclosure, the letter “L” is used to refer to a linker moiety as described herein; each L^{superscript}, (e.g., L^{a}, L^{s1}, L^{s2} L^{s3}, L^{s}, etc.) therefore is understood, in some embodiments, to be L, unless otherwise specified.

[0160] In some embodiments, L comprises at least one —N(R′)—, wherein R′ is as described in the present disclosure. In some embodiments, the —N(R′)— is bonded to two carbon atoms, wherein neither of the two carbon atoms forms a double bond with a heteroatom. In some embodiments, the —N(R′)— is not bonded to —C(O)—. In some embodiments, the —N(R′)— is not bonded to —C(S)—. In some embodiments, the —N(R′)— is not bonded to —C(═NR′)—. In some embodiments, L is -L′—N(R′)—, wherein L′ is optionally substituted bivalent C₁-C₁₉ aliphatic. In some embodiments, L is -L′—N(CH₃)—, wherein L′ is optionally substituted bivalent C₁-C₁₉ aliphatic.

[0161] In some embodiments, L comprises at least one —N(R′)C(O)—, wherein R′ is as described in the present disclosure. In some embodiments, L is -L′—N(R′)C(O)—, wherein each of L′ and R′ is independently as described in the present disclosure. In some embodiments, L is -L′—N(CH₃)C(O)—, wherein L′ is independently as described in the present disclosure.

[0162] In some embodiments, L comprises at least one —C(O)O—. In some embodiments, L comprises at least one —C(O)O—. In some embodiments, L is -L′-C(O)O— or -L′—OC(O)—, wherein each L′ is independently as described in the present disclosure. In some embodiments, L is -L′-C(O)O—, wherein each L′ is independently as described in the present disclosure. In some embodiments, L is -L′—OC(O)—, wherein each L′ is independently as described in the present disclosure.

[0163] In some embodiments, L comprises at least one —S(O)₂—N(R′)—, wherein R′ is as described in the present disclosure. In some embodiments, L comprises at least one —S(O)₂—N(R′)—, wherein R′ is as described in the present disclosure. In some embodiments, L is -L′—N(R′)—S(O)₂— or -L′-S(O)₂—N(R′)—, wherein each of L′ and R′ is independently as described in the present disclosure. In some embodiments, L is -L′—N(R′)—S(O)₂—, wherein each of L′ and R′ is independently as described in the present disclosure. In some embodiments, L is -L′-S(O)₂—N(R′)—, wherein each of L′ and R′ is independently as described in the present disclosure. In some embodiments, L is -L′—N(CH₃)—S(O)₂— or -L′-S(O)₂—N(CH₃)—, wherein each L′ is independently as described in the present disclosure. In some embodiments, L is -L′—N(CH₃)—S(O)₂—, wherein L′ is as described in the present disclosure. In some embodiments, L is -L′-S(O)₂—N(CH₃)—, wherein L′ is as described in the present disclosure.

[0164] In some embodiments, L comprises at least one —O—. In some embodiments, L is -L′—O−, wherein L′ is independently as described in the present disclosure.

[0165] In some embodiments, L is L′, wherein L′ is as described in the present disclosure. In some embodiments, L is optionally substituted alkylene. In some embodiments, L is unsubstituted alkylene.

[0166] In some embodiments, L is optionally substituted bivalent C₁-C₂₅ aliphatic. In some embodiments, L is optionally substituted bivalent C₁-C₂₀ aliphatic. In some embodiments, L is optionally substituted bivalent C₁-C₁₅ aliphatic. In some embodiments, L is optionally substituted bivalent C₁-C₁₀ aliphatic. In some embodiments, L is optionally substituted bivalent C₁-C₉ aliphatic. In some embodiments, L is optionally substituted bivalent C₁-C₅ aliphatic. In some embodiments, L is optionally substituted bivalent C₁-C₇ aliphatic. In some embodiments, L is optionally substituted bivalent C₁-C₆ aliphatic. In some embodiments, L is optionally substituted bivalent C₁-C₅ aliphatic. In some embodiments, L is optionally substituted bivalent C₁-C₄ aliphatic. In some embodiments, L is optionally substituted alkylene. In some embodiments, L is optionally substituted alkenylene. In some embodiments, L is unsubstituted alkylene. In some embodiments, L is —CH₂—. In some embodiments, L is —(CH₂)₂—. In some embodiments, L is —(CH₂)₃—. In some embodiments, L is —(CH₂)₄—. In some embodiments, L is —(CH₂)₅—. In some embodiments, L is —(CH₂)₆—. In some embodiments, L is —(CH₂)₇—. In some embodiments, L is —(CH₂)₈—. In some embodiments, L is bonded to a peptide backbone atom. In some embodiments, L is optionally substituted alkenylene. In some embodiments, L is unsubstituted alkenylene. In some embodiments, L is —CH₂—CH═CH—CH₂—.

[0167] In some embodiments, one end of a staple is connected to an atom Aⁿ¹ of the peptide backbone, wherein A^{s1} is optionally substituted with R¹ and is an atom of an amino acid residue at amino acid position n¹ of the peptide from the N-terminus, and the other end is connected to an atom Aⁿ² of the peptide backbone, wherein Aⁿ² is optionally substituted with R² (in some embodiments, R′ and/or R² is R which can be hydrogen) and is an atom of an amino acid residue at amino acid position n² of the peptide from the N-terminus, wherein each of n¹ and n² is independently an integer, and n²=n¹+m, wherein m is 3-12.

[0168] In some embodiments, m is 3. In some embodiments, m is 4. In some embodiments, m is 5. In some embodiments, m is 6. In some embodiments, m is 7. In some embodiments, m is 8. In some embodiments, m is 9. In some embodiments, m is 10. In some embodiments, m is 11. In some embodiments, a staple is referred to a (i, i+m) staple.

[0169] In some embodiments, Aⁿ¹ is a carbon atom. In some embodiments, Aⁿ¹ is achiral. In some embodiments, Aⁿ¹ is chiral. In some embodiments, Aⁿ¹ is R. In some embodiments, Aⁿ¹ is S.

[0170] In some embodiments, Aⁿ² is a carbon atom. In some embodiments, Aⁿ² is achiral. In some embodiments, Aⁿ² is chiral. In some embodiments, Aⁿ² is R. In some embodiments, Aⁿ² is S.

[0171] In some embodiments, Aⁿ¹ is achiral and Aⁿ² is achiral. In some embodiments, Aⁿ¹ is achiral and Aⁿ² is R. In some embodiments, Aⁿ¹ is achiral and Aⁿ² is S. In some embodiments, Aⁿ¹ is R and Aⁿ² is achiral. In some embodiments, Aⁿ¹ is R and Aⁿ² is R. In some embodiments, Aⁿ¹ is R and Aⁿ² is S. In some embodiments, Aⁿ¹ is S and Aⁿ² is achiral. In some embodiments, Aⁿ¹ is S and Aⁿ² is R. In some embodiments, Aⁿ¹ is S and Aⁿ² is S.

[0172] In some embodiments, provided stereochemistry at staple-backbone connection points and/or combinations thereof, optionally together with one or more structural elements of provided peptide, e.g., staple chemistry (hydrocarbon, non-hydrocarbon), staple length, etc. can provide various benefits, such as improved preparation yield, purity, and/or selectivity, improved properties (e.g., improved solubility, improved stability, lowered toxicity, improved selectivities, etc.), improved activities, etc. In some embodiments, provided stereochemistry and/or stereochemistry combinations are different from those typically used, e.g., those of U.S. Pat. No. 9,617,309, US 2015-0225471, US 2016-0024153, US 2016-0215036, US 2016-0244494, WO 2017/062518, and provided one or more of benefits described in the present disclosure.

[0173] In some embodiments, a staple can be of various lengths, in some embodiments, as represent by the number of chain atoms of a staple. In some embodiments, a chain of a staple is the shortest covalent connection in the staple from a first end (connection point with a peptide backbone) of a staple to a second end of the staple, wherein the first end and the second end are connected to two different peptide backbone atoms. In some embodiments, a staple comprises 5-30 chain atoms, e.g., 5-20, 5-15, 5, 6, 7, 8, 9, or 10 to 11, 12, 13, 14, 15, 16, 17, 18, 19, 20, 21, 22, 23, 24, or 25 chain atoms. In some embodiments, a staple comprises 5 chain atoms. In some embodiments, a staple comprises 6 chain atoms. In some embodiments, a staple comprises 7 chain atoms. In some embodiments, a staple comprises 8 chain atoms. In some embodiments, a staple comprises 9 chain atoms. In some embodiments, a staple comprises 10 chain atoms. In some embodiments, a staple comprises 11 chain atoms. In some embodiments, a staple comprises 12 chain atoms. In some embodiments, a staple comprises 13 chain atoms. In some embodiments, a staple comprises 14 chain atoms. In some embodiments, a staple comprises 15 chain atoms. In some embodiments, a staple comprises 16 chain atoms. In some embodiments, a staple comprises 17 chain atoms. In some embodiments, a staple comprises 18 chain atoms. In some embodiments, a staple comprises 19 chain atoms. In some embodiments, a staple comprises 20 chain atoms. In some embodiments, a staple has a length of 5 chain atoms. In some embodiments, a staple has a length of 6 chain atoms. In some embodiments, a staple has a length of 7 chain atoms. In some embodiments, a staple has a length of 8 chain atoms. In some embodiments, a staple has a length of 9 chain atoms. In some embodiments, a staple has a length of 10 chain atoms. In some embodiments, a staple has a length of 11 chain atoms. In some embodiments, a staple has a length of 12 chain atoms. In some embodiments, a staple has a length of 13 chain atoms. In some embodiments, a staple has a length of 14 chain atoms. In some embodiments, a staple has a length of 15 chain atoms. In some embodiments, a staple has a length of 16 chain atoms. In some embodiments, a staple has a length of 17 chain atoms. In some embodiments, a staple has a length of 18 chain atoms. In some embodiments, a staple has a length of 19 chain atoms. In some embodiments, a staple has a length of 20 chain atoms. In some embodiments, a staple has a length of 8-15 chain atoms. In some embodiments, a staple has 8-12 chain atoms. In some embodiments, a staple has 9-12 chain atoms. In some embodiments, a staple has 9-10 chain atoms. In some embodiments, a staple has 8-10 chain atoms. In some embodiments, length of a staple can be adjusted according to the distance of the amino acid residues it connects, for example, a longer staple may be utilized for a (i, i+7) staple than a (i, i+4) or (i, i+3) staple. In some embodiments, a (i, i+3) staple has about 5-10, 5-8, e.g., about 5, 6, 7, 8, 9 or 10 chain atoms. In some embodiments, a (i, i+3) staple has 5 chain atoms. In some embodiments, a (i, i+3) staple has 6 chain atoms. In some embodiments, a (i, i+3) staple has 7 chain atoms. In some embodiments, a (i, i+3) staple has 8 chain atoms. In some embodiments, a (i, i+3) staple has 9 chain atoms. In some embodiments, a (i, i+3) staple has 10 chain atoms. In some embodiments, a (i, i+4) staple has about 5-12, 5-10, 7-12, 5-8, e.g., about 5, 6, 7, 8, 9, 10, 11 or 12 chain atoms. In some embodiments, a (i, i+4) staple has 5 chain atoms. In some embodiments, a (i, i+4) staple has 6 chain atoms. In some embodiments, a (i, i+4) staple has 7 chain atoms. In some embodiments, a (i, i+4) staple has 8 chain atoms. In some embodiments, a (i, i+4) staple has 9 chain atoms. In some embodiments, a (i, i+4) staple has 10 chain atoms. In some embodiments, a (i, i+4) staple has 11 chain atoms. In some embodiments, a (i, i+4) staple has 12 chain atoms. In some embodiments, a (i, i+7) staple has about 8-25, 10-25, 10-16, 12-15, e.g., about 8, 9, 10, 11, 12, 13, 14, 15, 16, 17, 18, 19, 20, 21, 22, 23, 24, or 25 chain atoms. In some embodiments, a (i, i+7) staple has 8 chain atoms. In some embodiments, a (i, i+7) staple has 9 chain atoms. In some embodiments, a (i, i+7) staple has 10 chain atoms. In some embodiments, a (i, i+7) staple has 11 chain atoms. In some embodiments, a (i, i+7) staple has 12 chain atoms. In some embodiments, a (i, i+7) staple has 13 chain atoms. In some embodiments, a (i, i+7) staple has 14 chain atoms. In some embodiments, a (i, i+7) staple has 15 chain atoms. In some embodiments, a (i, i+7) staple has 16 chain atoms. In some embodiments, a (i, i+7) staple has 17 chain atoms. In some embodiments, a (i, i+7) staple has 18 chain atoms. In some embodiments, a (i, i+7) staple has 19 chain atoms. In some embodiments, a (i, i+7) staple has 20 chain atoms. In some embodiments, a (i, i+7) staple has 21 chain atoms. In some embodiments, a (i, i+7) staple has 22 chain atoms. In some embodiments, a stapled peptide has two staples, each of which is independently such a (i, i+3), (i, i+4) or (i, i+7) staple. In some embodiments, a stapled peptide has such a (i, i+3) staple and such a (i, i+7) staple. In some embodiments, a stapled peptide has such a (i, i+4) staple and such a (i, i+7) staple.

[0174] Staple lengths may be otherwise described. For example, in some embodiments, staple lengths may be described as the total number of chain atoms and non-chain ring atoms, where a non-chain ring atom is an atom of the staple which forms a ring with one or more chain atoms but is not a chain atom in that it is not within the shortest covalent connection from a first end of the staple to a second end of the staple. In some embodiments, staples formed using Monomer A (which comprises an azetidine moiety), Monomer B (which comprises a pyrrolidine moiety), and/or Monomer C (which comprises a pyrrolidine moiety), etc., may comprise one or two non-chain ring atoms.

[0175] In some embodiments, a staple has no heteroatoms in its chain. In some embodiments, a staple comprises at least one heteroatom in its chain. In some embodiments, a staple comprises at least one nitrogen atom in its chain.

[0176] In some embodiments, a staple is L^{s}, wherein L^{s} is an optionally substituted, bivalent C₈₋₁₄ aliphatic group wherein one or more methylene units of the aliphatic group are optionally and independently replaced with —C(R′)₂—, -Cy-, —O—, —S—, —S—S—, —N(R′)—, —C(O)—, —C(S)—, —C(NR′)—, —C(O)N(R′)—, —N(R′)C(O)N(R′)—, —N(R′)C(O)O—, —S(O)—, —S(O)₂—, —S(O)₂N(R′)—, —C(O)S—, or —C(O)O—. In some embodiments, a staple is L^{s}, wherein L^{s} is an optionally substituted, bivalent C₉₋₁₃ aliphatic group wherein one or more methylene units of the aliphatic group are optionally and independently replaced with —C(R′)₂—, -Cy-, —O—, —S—, —S—S—, —N(R′)—, —C(O)—, —C(S)—, —C(NR′)—, —C(O)N(R′)—, —N(R′)C(O)N(R′)—, —N(R′)C(O)O—, —S(O)—, —S(O)₂—, —S(O)₂N(R′)—, —C(O)S—, or —C(O)O—. In some embodiments, a staple is L^{s}, wherein L^{s} is an optionally substituted, bivalent C₁₀₋₁₅ aliphatic group wherein one or more methylene units of the aliphatic group are optionally and independently replaced with —C(R′)₂—, -Cy-, —O—, —S—, —S—S—, —N(R′)—, —C(O)—, —C(S)—, —C(NR′)—, —C(O)N(R′)—, —N(R′)C(O)N(R′)—, —N(R′)C(O)O—, —S(O)—, —S(O)₂—, —S(O)₂N(R′)—, —C(O)S—, or —C(O)O—. In some embodiments, a staple is L^{s}, wherein L^{s} is an optionally substituted, bivalent C₁₁₋₁₄ aliphatic group wherein one or more methylene units of the aliphatic group are optionally and independently replaced with —C(R′)₂—, -Cy-, —O—, —S—, —S—S—, —N(R′)—, —C(O)—, —C(S)—, —C(NR′)—, —C(O)N(R′)—, —N(R′)C(O)N(R′)—, —N(R′)C(O)O—, —S(O)—, —S(O)₂—, —S(O)₂N(R′)—, —C(O)S—, or —C(O)O—. In some embodiments, a staple is a (i, i+3) staple in that not including the two amino acid residues that are directly connected to the staple, there are two amino acid residues between the two amino acid residues that are directly connected to the staple. In some embodiments, a staple is a (i, i+4) staple in that not including the two amino acid residues that are directly connected to the staple, there are three amino acid residues between the two amino acid residues that are directly connected to the staple. In some embodiments, a staple is a (i, i+7) staple in that not including the two amino acid residues that are directly connected to the staple, there are six amino acid residues between the two amino acid residues that are directly connected to the staple.

[0177] In some embodiments, for each of L^{s}, L^{s1}, L^{s2}, and L^{s3}, any replacement of methylene units, if any, is replaced with —N(R′)—, —C(O)—N(R′)—, —N(R′)C(O)O—, —C(O)O—, —S(O)₂N(R′)—, or —O—. In some embodiments, for each of L^{s}, L^{s1}, L^{s2}, and L^{s3}, any replacement of methylene units, if any, is replaced with —N(R′)—, —N(R′)—C(O)—, or —N(R′)C(O)O—. In some embodiments, for each of L^{s}, L^{s1}, L^{s2}, and L^{s3}, any replacement of methylene units, if any, is replaced with —N(R′)— or —N(R′)C(O)O—. In some embodiments, for each of L^{s}, L^{s1}, L^{s2}, and L^{s3}, any replacement of methylene units, if any, is replaced with —N(R′)—. In some embodiments, for each of L^{s}, L^{s1}, L^{s2}, and L^{s3}, any replacement of methylene units, if any, is replaced with —N(R′)C(O)O—.

[0178] In some embodiments, a staple comprises a double bond. In some embodiments, a staple comprises a double bond may be formed by olefin metathesis of two olefins. In some embodiments, staples are formed by metathesis reactions, e.g., involving one or more double bonds in amino acid residues as described herein. In some embodiments, a first amino acid residue comprising an olefin (e.g., AA1-CH═CH₂) and a second amino acid residue comprising an olefin (e.g., AA2-CH═CH₂) are stapled (e.g., forming AA1-CH═CH-AA2, wherein AA1 and AA2 are typically linked through one or more amino acid residues). In some embodiments, an olefin, e.g., in a staple, is converted into —CHR′—CHR′—, wherein each R′ is independently as described herein. In some embodiments, R′ is R as described herein. In some embodiments, R′ is —H. In some embodiments, each R′ is —H. In some embodiments, R′ is —OR, wherein R is as described herein. In some embodiments, R′ is —OH. In some embodiments, R′ is —N(R)₂ wherein each R is independently as described herein. In some embodiments, R′ is —SR wherein R is as described herein. In some embodiments, R′ is R wherein R is optionally substituted aliphatic, e.g., C₁₋₁₀ aliphatic. In some embodiments, R′ is R wherein R is optionally substituted aliphatic, e.g., C₁₋₁₀ alkenyl. In some embodiments, R′ is R wherein R is optionally substituted aliphatic, e.g., C₁₋₁₀ alkynyl. In some embodiments, —CHR′—CHR′— is —CH₂—CH₂—. In some embodiments, each of the two olefins is independently of a side chain of an amino acid residue. In some embodiments, each olefin is independently a terminal olefin. In some embodiments, each olefin is independently a mono-substituted olefin.

[0179] In some embodiments, a suitable amino acid for stapling has structure of formula A-IL:

NH(R^{a1})-L^{a1}-C(-L^{a}-CH═CH₂)(R^{a3})-L^{a2}-COOH, A-II

or a salt thereof, wherein each variable is independently as described in the present disclosure.

[0180] In some embodiments, an amino acid of formula A-I is a compound having the structure of formula A-III:

NH(R^{a1})—C(-L^{a}-CH═CH₂)(R^{a3})—COOH, A-III

or a salt thereof, wherein each variable is independently as described in the present disclosure.

[0181] In some embodiments, an amino acid of formula A-I or a salt thereof has structure of formula A-IV:

NH(R^{a1})-L^{a1}-C(-L^{a}-COOH)(R^{a3})-L^{a2}-COOH, A-IV

or a salt thereof, wherein each variable is independently as described in the present disclosure. In some embodiments, an amino acid suitable for stapling has the structure of formula A-IV or a salt thereof, wherein each variable is independently as described in the present disclosure.

[0182] In some embodiments, an amino acid has structure of formula A-V:

NH(R^{a1})-L^{a1}-C(-L^{a}-R^{SP1})(R^{a3})-L^{a2}-COOH, A-V

or a salt thereof, wherein each variable is independently as described in the present disclosure. In some embodiments, an amino acid suitable for stapling has the structure of formula A-V or a salt thereof, wherein each variable is independently as described in the present disclosure.

[0183] In some embodiments, an amino acid for stapling has structure of formula A-VI:

NH(R^{a1})-L^{a1}-C(-L^{a}-R^{SP1})(-L^{a}-R^{SP2})-L^{a2}-COOH, A-VI

or a salt thereof, wherein each variable is independently as described in the present disclosure. In some embodiments, an amino acid suitable for stapling has the structure of formula A-VI or a salt thereof, wherein each variable is independently as described in the present disclosure.

[0184] As used herein, each of R^{SP1} and R^{SP2} independently comprises a reactive group. In some embodiments, each of R^{SP1} and R^{SP2} is independently a reactive group. In some embodiments, a reactive group is optionally substituted —CH═CH₂. In some embodiments, a reactive group is —CH═CH₂. In some embodiments, a reactive group is an amino group, e.g., —NHR, wherein R is as described herein. In some embodiments, a reactive group is an acid group. In some embodiments, a reactive group is —COOH or an activated form thereof. In some embodiments, a reactive group is for a cycloaddition reaction (e.g., [3+2], [4+2], etc.), e.g., an alkene, an alkyne, a diene, a 1,3-dipole (e.g., —N₃), etc. In some embodiments, a reactive group is optionally substituted —C≡CH. In some embodiments, a reactive group is —C≡CH. In some embodiments, a reactive group is —N₃.

[0185] In some embodiments, R^{SP1} or R^{SP2} of a first amino acid residue and R^{SP1} or R^{SP2} of a second amino acid residue can react with each other so that the two amino acid residues are connected with a staple. In some embodiments, a reactive is olefin metathesis between two olefin, e.g., two —CH═CH₂. In some embodiments, a reaction is amidation and one reactive group is an amino group, e.g., —NHR wherein R is as described herein (e.g., in some embodiments, R is —H; in some embodiments, R is optionally substituted C₁₋₆ aliphatic), and the other is an acid group (e.g., —COOH) or an activated form thereof. In some embodiments, a reaction is a cycloaddition reaction, e.g., [4+2], [3+2], etc. In some embodiments, a first and a second reactive groups are two reactive groups suitable for a cycloaddition reaction. In some embodiments, a reaction is a click reaction. In some embodiments, one reaction group is or comprises —N₃, and the other is or comprises an alkyne, e.g., a terminal alkyne or a activated/strained alkyne. In some embodiments, the other is or comprises —C≡CH.

[0186] In some embodiments, R^{SP1} or R^{SP2} of a first amino acid residue and R^{SP1} or R^{SP2} of a second amino acid residue can react with a reagent so that the two are connected to form a staple. In some embodiments, a reagent comprises two reactive groups, one of which reacts with R^{SP1} or R^{SP2} of a first amino acid residue, and the other reacts with R^{SP1} or R^{SP2} of a first amino acid residue. In some embodiments, R^{SP1} or R^{SP2} of both amino acid residues are the same or the same type, e.g., both are amino groups, and the two reactive groups of a linking reagent are also the same, e.g., both are acid groups such as —COOH or activated form thereof. In some embodiments, R^{SP1} or R^{SP2} of both amino acid residues are both acid groups, e.g., —COOH or activated form thereof, and both reactive groups of a linking agent are amino groups. In some embodiments, R^{SP1} or R^{SP2} of both amino acid residues are both nucleophilic groups, e.g., —SH, and both reactive groups of a linking reagent are electrophilic (e.g., carbon attached to leaving groups such as —Br, —I, etc.).

[0187] In some embodiments, R^{SP1} and R^{SP2} are the same. In some embodiments, R^{SP1} and R^{SP2} are different. In some embodiments, R^{SP1} is or comprises —CH═CH₂. In some embodiments, R^{SP1} is or comprises —COOH. In some embodiments, R^{SP1} is or comprises an amino group. In some embodiments, R^{SP1} is or comprises —NHR. In some embodiments, R is hydrogen or optionally substituted C₁₋₆ aliphatic. In some embodiments, R^{SP1} is or comprises —NH₂. In some embodiments, R^{SP1} is or comprises —N₃. In some embodiments, R^{SP2} is or comprises —CH═CH₂. In some embodiments, R^{SP2} is or comprises —COOH. In some embodiments, R^{SP2} is or comprises an amino group. In some embodiments, R^{SP2} is or comprises —NHR. In some embodiments, R is hydrogen or optionally substituted C₁₋₆ aliphatic. In some embodiments, R^{SP2} is or comprises —NH₂. In some embodiments, R^{SP2} is or comprises —N₃.

[0188] In some embodiments, each amino acid residue of a pair of amino acid residues is independently a residue of an amino acid of formula A-II or A-III or a salt thereof. In some embodiments, such a pair of amino acid residues is stapled, e.g., through olefin metathesis. In some embodiments, a staple has the structure of -L^{a}-CH═CH-L^{a}-, wherein each variable is independently as described herein. In some embodiments, olefin in a staple is reduced. In some embodiments. In some embodiments, a staple has the structure of -L^{a}-CH₂—CH₂-L^{a}-, wherein each variable is independently as described herein. In some embodiments, one L^{a} is L^{s1} as described herein, and one L^{a} is L^{s3} as described herein.

[0189] In some embodiments, each amino acid residue of a pair of amino acid residues is independently a residue of an amino acid of formula A-II or A-III or a salt thereof. In some embodiments, such a pair of amino acid residues is stapled, e.g., through olefin metathesis. In some embodiments, a staple has the structure of -L^{a}-CH═CH-L^{a}-, wherein each variable is independently as described herein. In some embodiments, olefin in a staple is reduced. In some embodiments. In some embodiments, a staple has the structure of -L^{a}-CH₂—CH₂-L^{a}-, wherein each variable is independently as described herein. In some embodiments, one L^{a} is L^{s1} as described herein, and one L^{a} is L^{s3} as described herein.

[0190] In some embodiments, two amino acid residues, e.g., of amino acids independently of formula A-I or a salt of, connected by a staple have the structure of —N(R^{a1})-L^{a1}-C(-L^{s}-R^{AA})(R^{a3})-L^{a2}-CO—, wherein each variable is independently as described herein, and R^{AA} is an amino acid residue. In some embodiments, two amino acid residues, e.g., of amino acids independently of formula A-I or a salt of, connected by a staple have the structure of —N(-L^{s}-R^{AA})-L^{a1}-C(R^{a2})(R^{a3})-L^{a2}-CO—, wherein each variable is independently as described herein, and R^{AA} is an amino acid residue. In some embodiments, two amino acid residues, e.g., of amino acids independently of formula A-I or a salt of, connected by a staple have the structure of R^{a1}—N(-L^{s}-R^{AA})-L^{a1}-C(R^{a2})(R^{a3})-L^{a2}-CO—, wherein each variable is independently as described herein, and R^{AA} is an amino acid residue. In some embodiments, three amino acid residues, e.g., of amino acids independently of formula A-I or a salt of, connected by two staples have the structure of R^{a1}—N(-L^{s}-R^{AA})-L^{a1}-C(-L^{s}-R^{AA})(R^{a3})-L^{a2}-CO—, wherein each variable is independently as described herein, and R^{AA} is an amino acid residue. In some embodiments, three amino acid residues, e.g., of amino acids independently of formula A-I or a salt of, connected by two staples have the structure of —N(-L^{s}-R^{AA})-L^{a1}-C(-L^{s}-R^{AA})(R^{a3})-L^{a2}-CO—, wherein each variable is independently as described herein, and R^{AA} is an amino acid residue. In some embodiments, three amino acid residues, e.g., of amino acids independently of formula A-I or a salt of, connected by two staples (e.g., X⁴ stapled with both X¹ and X¹⁴) have the structure of —N(R^{a1})-L^{a1}-C(-L^{s}-R^{AA})(-L^{s}-R^{AA})-L^{a2}-CO—, wherein each variable is independently as described herein, and R^{AA} is an amino acid residue. In some embodiments, each R^{AA} is independently a residue of an amino acid of formula A-I, A-II, A-III, A-IV, A-V, A-VI, etc. or a salt thereof. In some embodiments, R^{AA} is —C(R^{a3})[-L^{a1}-N(R^{a1})—](-L^{a2}-CO—), wherein each variable is independently as described herein. In some embodiments, R^{AA} is —C(R^{a3})[N(R^{a1})—](—CO—), wherein each variable is independently as described herein. In some embodiments, each R^{AA} is independently —N(—)[-L^{a1}-C(R^{a2})(R^{a3})-L^{a2}-CO—], wherein each variable is independently as described herein, wherein —C(—)(R^{a3})— is bonded to a staple. In some embodiments, each R^{AA} is independently —N(—)[—C(R^{a2})(R^{a3})CO—], wherein each variable is independently as described herein, wherein —C(—)(R^{a3})— is bonded to a staple. In some embodiments, each R^{AA} is independently R^{a1}—N(—)[-L^{a1}-C(R^{a2})(R^{a3})-L^{a2}-CO—], wherein each variable is independently as described herein, wherein —C(—)(R^{a3})— is bonded to a staple. In some embodiments, each R^{AA} is independently R^{a1}—N(—)[—C(R^{a2})(R^{a3})—CO—], wherein each variable is independently as described herein, wherein —C(—)(R^{a3})— is bonded to a staple.

[0191] Various staples, e.g., L^{s}, are as described herein. In some embodiments, L^{s} is -L^{s1}-L^{s2}-L^{s3}- as described herein. In some embodiments, L^{s1} is L^{a} as described herein. In some embodiments, L^{s3} is L^{a} as described herein. In some embodiments, L^{s1} is L^{a} of a first of two stapled amino acid residues. In some embodiments, L^{s2} is L^{a} of a second of two stapled amino acid residues. In some embodiments, L^{s2} is or comprises a double bond. In some embodiments, L^{s2} is or comprises —CH═CH—. In some embodiments, L^{s2} is or comprises optionally substituted —CH₂—CH₂—. In some embodiments, L^{s2} is or comprises —CH₂—CH₂—. In some embodiments, L^{s2} is or comprises —C(O)N(R′)— (e.g., a staple formed by two amino acid residues one of which has a R^{SP1} group that is or comprises an amino group and the other of which has a R^{SP2} group that is or comprises —COOH). In some embodiments, L^{s2} is or comprises —C(O)NH—. In some embodiments, each of L^{s1} and L^{s3} is independently optionally substituted linear or branched C₁₋₁₀ hydrocarbon chain. In some embodiments, each of L^{s1} and L^{s3} is independently —(CH₂)ₙ—, wherein n is 1-10. In some embodiments, L^{s1} is —CH₂—. In some embodiments, L^{s3} is —(CH₂)₃—.

[0192] In some embodiments, L^{s} is —CH₂—CH═CH—(CH₂)₃—. In some embodiments, L^{s} is —(CH₂)₆—.

[0193] In some embodiments, L^{s} is —(CH₂)₂—C(O)NH—(CH₂)₄—.

[0194] In some embodiments, L^{s} is bonded to two backbone carbon atoms. In some embodiments, L^{s} is bonded to two alpha carbon atoms of two stapled amino acid residues. In some embodiments, L^{s} is bonded to a backbone nitrogen atom and a backbone carbon atom (e.g., an alpha carbon).

[0195] In some embodiments, L^{a} comprises at least one —N(R′)— wherein R′ is independently as described in the present disclosure. In some embodiments, L^{a} comprises -L^{am1}-N(R′)— wherein R′ is independently as described in the present disclosure, and L^{am1} is as described herein. In some embodiments, L^{a} is or comprises -L^{am1}-N(R′)-L^{am2}-, wherein each of L^{am1}, R′, and L^{am2} is independently as described herein. In some embodiments, R′ is optionally substituted C₁₋₆ aliphatic. In some embodiments, R′ is methyl. In some embodiments, R′ is taken together with R^{a3} to form an optionally substituted ring as described herein. In some embodiments, a formed ring is a 3-10 membered monocyclic saturated ring as described herein. In some embodiments, a formed ring has no additional heteroatom ring atom in addition to the nitrogen of —N(R′)—. In some embodiments, a formed ring is 3-membered. In some embodiments, a formed ring is 4-membered. In some embodiments, a formed ring is 5-membered. In some embodiments, a formed ring is 6-membered.

[0196] In some embodiments, L^{a} comprises at least one —C(R′)₂— wherein each R′ is independently as described in the present disclosure. In some embodiments, L^{a} comprises -L^{am1}-C(R′)₂— wherein R′ is independently as described in the present disclosure, and L^{am1} is as described herein. In some embodiments, L^{a} is or comprises -L^{am1}-C(R′)₂-L^{am2}-, wherein each of L^{am1}, R′, and L^{am2} is independently as described herein. In some embodiments, R′ is —H. In some embodiments, —C(R′)₂— is optionally substituted —CH₂—. In some embodiments, —C(R′)₂— is —CH₂—. In some embodiments, one R′ is taken together with R^{a3} to form an optionally substituted ring as described herein. In some embodiments, a formed ring is a 3-10 membered monocyclic saturated ring as described herein. In some embodiments, a formed ring has no additional heteroatom ring atom in addition to the nitrogen of —N(R′)—. In some embodiments, a formed ring is 3-membered. In some embodiments, a formed ring is 4-membered. In some embodiments, a formed ring is 5-membered. In some embodiments, a formed ring is 6-membered.

[0197] As described herein, each of L^{am1} and L^{am2} is independently L^{am} as described herein. As described herein, L^{am} is a covalent bond, or an optionally substituted, bivalent C₁-C₁₀ aliphatic group wherein one or more methylene units of the aliphatic group are optionally and independently replaced with —C(R′)₂—, -Cy-, —O—, —S—, —S—S—, —N(R′)—, —C(O)—, —C(S)—, —C(NR′)—, —C(O)N(R′)—, —N(R′)C(O)N(R′)—, —N(R′)C(O)O—, —S(O)—, —S(O)₂—, —S(O)₂N(R′)—, —C(O)S—, or —C(O)O—. In some embodiments, L^{am} is a covalent bond. In some embodiments, L^{am} is an optionally substituted bivalent C₁-C₁₀ aliphatic group. In some embodiments, L^{am} is an optionally substituted bivalent linear C₁-C₁₀ aliphatic group. In some embodiments, L^{am} is optionally substituted C₁₋₁₀ alkylene. In some embodiments, L^{am} is C₁₋₁₀ alkylene. In some embodiments, L^{am} is optionally substituted linear C₁₋₁₀ alkylene. In some embodiments, L^{am} is optionally substituted —CH₂—. In some embodiments, L^{am} is —CH₂—.

[0198] In some embodiments, L^{a}mL is a covalent bond. In some embodiments, L^{am1} is an optionally substituted bivalent C₁-C₁₀ aliphatic group. In some embodiments, L^{am1} is an optionally substituted bivalent linear C₁-C₁₀ aliphatic group. In some embodiments, L^{am1} is optionally substituted C₁₋₁₀ alkylene. In some embodiments, L^{am1} is C₁₋₁₀ alkylene. In some embodiments, L^{a1} is optionally substituted linear C₁-10 alkylene. In some embodiments, L^{am1} is optionally substituted —CH₂—. In some embodiments, L^{am1} is —CH₂—. In some embodiments, L^{am1} is bonded to a backbone atom. In some embodiments, L^{am1} is bonded to an alpha-carbon of an amino acid.

[0199] In some embodiments, L^{am2} is a covalent bond. In some embodiments, L^{am2} is an optionally substituted bivalent C₁-C₁₀ aliphatic group. In some embodiments, L^{am2} is an optionally substituted bivalent linear C₁-C₁₀ aliphatic group. In some embodiments, L^{am2} is optionally substituted C₁₋₁₀ alkylene. In some embodiments, L^{am2} is C₁₋₁₀ alkylene. In some embodiments, L^{am2} is optionally substituted linear C₁₋₁₀ alkylene. In some embodiments, L^{am2} is optionally substituted —CH₂—. In some embodiments, L^{am2} is —CH₂—. In some embodiments, L^{am2} is or comprises —C(O)—. In some embodiments, —C(O)— is bonded to a nitrogen atom. In some embodiments, L^{am2} is or comprises —S(O)₂—. In some embodiments, —S(O)₂— is bonded to a nitrogen atom. In some embodiments, L^{am2} is or comprises —O—. In some embodiments, L^{am2} is or comprises —C(O)—O—. In some embodiments, —C(O)—O— is bonded to a nitrogen atom. In some embodiments, L^{am2} is bonded to a nitrogen atom, and it comprises a —C(O)— group which is bonded to the nitrogen atom. In some embodiments, L^{am2} is bonded to a nitrogen atom, and it comprises a —C(O)—O— group which is bonded to the nitrogen atom. In some embodiments, L^{am2} is or comprises —C(O)—O—CH₂—, wherein the —CH₂— is optionally substituted. In some embodiments, L^{am2} is —C(O)—O—CH₂—.

[0200] In some embodiments, L^{a} is L^{s1} as described herein. In some embodiments, L^{a} is L^{s2} as described herein.

[0201] In some embodiments, R^{a3} is -L^{a}-CH═CH₂, wherein L^{a} is independently as described herein. In some embodiments, each of R^{a2} and R^{a3} independently comprises a double bond, e.g., a terminal olefin which can be optionally and independently stapled with another residue comprising an olefin. In some embodiments, each of R^{a2} and R^{a3} are independently -L^{a}-CH═CH₂. In some embodiments, an amino acid are stapled with two amino acid residues independently through R^{a2} and R^{a3}. In some embodiments, such an amino acid is B5.

[0202] In some embodiments, an amino acid is selected from Tables A-I, A-II, A-III (may be presented as Fmoc-protected). As appreciated by those skilled in the art, among other things, when incorporated into peptides, Fmoc-protected amino groups and carboxyl groups may independently form amide connections with other amino acid residues (or N- or C-terminus capping groups, or exist as N- or C-terminus amino or carboxyl groups). Olefins, including those in Alloc groups, may be utilized to form staples through olefin metathesis. Staples comprising olefins may be further modified, e.g., through hydrogenation to convert olefin double bonds into single bonds, and/or through CO₂ extrusion to convert carbamate moieties (e.g., —O—(CO)—N(R′)—) into amine moieties (e.g., —N(R′)—). In some embodiments, an agent is or comprises a stapled peptide (e.g., a stapled peptide described according to Table E3) or a salt thereof, in which stapled peptide each double bond is converted into a single bond. In some embodiments, a conversion is achieved through hydrogenation which adds a —H to each olefin carbon atom. In some embodiments, an olefin double bond is replaced with —CHR′—CHR′—, wherein each R′ is independently as described herein. In some embodiments, R′ is R as described herein. In some embodiments, R′ is —H. In some embodiments, each R′ is —H. In some embodiments, R′ is —OR, wherein R is as described herein. In some embodiments, R′ is —OH. In some embodiments, R′ is —N(R)₂ wherein each R is independently as described herein. In some embodiments, R′ is —SR wherein R is as described herein. In some embodiments, R′ is R wherein R is optionally substituted aliphatic, e.g., C₁₋₁₀ aliphatic. In some embodiments, R′ is R wherein R is optionally substituted aliphatic, e.g., C₁₋₁₀ alkenyl. In some embodiments, R′ is R wherein R is optionally substituted aliphatic, e.g., C₁₋₁₀ alkynyl. In some embodiments, —CHR′—CHR′— is —CH₂—CH₂—.

TABLE A-I
Exemplary amino acids (Fmoc-Protected).

| | | |
|---|---|---|
| Monomer A (M_{A}) | Monomer B (M_{B}) | Monomer C (M_{C}) |
| [chemical structure] | [chemical structure] | [chemical structure] |

TABLE A-II
Exemplary amino acids (Fmoc-Protected).

| | | |
|---|---|---|
| Monomer D (M_{D}) | Monomer E (M_{E}) | Monomer F (M_{F}) |
| [chemical structure] | [chemical structure] | [chemical structure] |
| Monomer G (M_{G}) | Monomer H (M_{H}) | Monomer I (M_{I}) |
| [chemical structure] | [chemical structure] | [chemical structure] |

TABLE A-III
Exemplary amino acids (Fmoc-Protected).
S₃

[chemical structure]

R₃

[chemical structure]

S₄

[chemical structure]

R₄

[chemical structure]

S₅

[chemical structure]

R₅

[chemical structure]

B₅

[chemical structure]

S₆

[chemical structure]

R₆

[chemical structure]

S₇

[chemical structure]

R₇

[chemical structure]

S₈

[chemical structure]

R8

[chemical structure]

[chemical structure]

[chemical structure]

PL3

[chemical structure]

PyrS

[chemical structure]

PyrS1

[chemical structure]

PyrS2

[chemical structure]

PyrS3

[chemical structure]

RdN

[chemical structure]

ReN

[chemical structure]

RgN

[chemical structure]

S10

[chemical structure]

SdN

[chemical structure]

SeN

[chemical structure]

SgN

[chemical structure]

[0203] In some embodiments, an amino acid is an alpha-amino acid. In some embodiments, an amino acid is an L-amino acid. In some embodiments, an amino acid is a D-amino acid. In some embodiments, the alpha-carbon of an amino acid is achiral. In some embodiments, an amino acid is a beta-amino acid. In some embodiments, an amino acid is a gamma-amino acid.

[0204] In some embodiments, a provided amino acid sequence contains two or more amino acid residues whose side chains are linked together to form one or more staples. In some embodiments, a provided amino acid sequence contains two or more amino acid residues, each of which independently has a side chain comprising an olefin. In some embodiments, a provided amino acid sequence contains two or more amino acid residues, each of which independently has a side chain comprising a terminal olefin. In some embodiments, a provided amino acid sequence contains two and no more than two amino acid residues, each of which independently has a side chain comprising an olefin. In some embodiments, a provided amino acid sequence contains two and no more than two amino acid residues, each of which independently has a side chain comprising a terminal olefin. In some embodiments, a provided amino acid sequence comprises at least one residue of an amino acid that comprises an olefin and a nitrogen atom other than the nitrogen atom of its amino group. In some embodiments, a provided amino acid sequence comprises at least one residue of an amino acid that comprises a terminal olefin and a nitrogen atom other than the nitrogen atom of its amino group. In some embodiments, a provided amino acid sequence comprises at least one residue of an amino acid that has a side chain than comprises a terminal olefin and a nitrogen atom. In some embodiments, a provided amino acid sequence comprises at least one residue of an amino acid of formula A-I, wherein R^{a2} comprising an olefin and a —N(R′)— moiety, wherein R′ is as described in the present disclosure (including, in some embodiments, optionally taken together with R^{a3} and their intervening atoms to form an optionally substituted ring as described in the present disclosure). In some embodiments, R^{a2} comprising a terminal olefin and a —N(R′)— moiety wherein R′ is as described in the present disclosure. In some embodiments, a provided amino acid sequence comprises at least one residue of an amino acid selected from Table A-I. In some embodiments, a provided amino acid sequence comprises at least one residue of an amino acid selected from Table A-II. In some embodiments, a provided amino acid sequence comprises at least one residue of an amino acid selected from Table A-III. In some embodiments, two olefins from two side chains are linked together through olefin metathesis to form a staple. In some embodiments, a staple is preferably formed by side chains of amino acid residues that are not at the corresponding positions of a target of interest. In some embodiments, a formed staple does not disrupt interaction between the peptide and a target of interest.

[0205] In some embodiments, a provided staple is a hydrocarbon staple. In some embodiments, a hydrocarbon staple comprises no chain heteroatoms wherein a chain of a staple is the shortest covalent connection within the staple from one end of the staple to the other end of the staple.

[0206] In some embodiments, an olefin in a staple is a Z-olefin. In some embodiments, an olefin in a staple in an E-olefin. In some embodiments, a provided composition comprises stapled peptides comprising a staple that contains a Z-olefin and stapled peptides comprising a staple that contains an E-olefin. In some embodiments, a provided composition comprises stapled peptides comprising a staple that contains a Z-olefin. In some embodiments, a provided composition comprises stapled peptides comprising a staple that contains an E-olefin. In some embodiments, otherwise identical stapled peptides that differ only in the E Z configuration of staple olefin demonstrate different properties and/or activities as demonstrated herein. In some embodiments, stapled peptides with E-olefin in a staple may provide certain desirable properties and/or activities given the context. In some embodiments, stapled peptides with Z-olefin in a staple may provide certain desirable properties and/or activities given the context.

[0207] In some embodiments, the present disclosure provides compositions comprising stapled peptides. In some embodiments, a composition comprises one and only one stereoisomer of a stapled peptide (e.g., E or Z isomer, and/or a single diastereomer/enantiomer with respect to a chiral center, etc.). In some embodiments, a composition comprises two or more stereoisomers (e.g., both E and Z isomers of one or more double bonds, and/or one or more diastereomers/enantiomers with respect to a chiral center, etc.). In some embodiments, a composition corresponds to a single peak in a chromatographic separation, e.g., HPLC. In some embodiments, a peak comprises one and only one stereoisomers. In some embodiments, a peak comprises two or more stereoisomers.

[0208] In some embodiments, two staples may be bonded to the same atom of the peptide backbone, forming a stitched peptide.

[0209] In some embodiments, a staple is pro-lock wherein one end of the staple is bonded to the alpha-carbon of a proline residue.

[0210] In some embodiments, a staple is a staple illustrated below in Tables S-1, S-2, S-3, S-4 and S-5 (with exemplary peptide backbone illustrated for clarity (can be applied to other peptide backbone), each X independently being an amino acid residue). In some embodiments, a staple is a staple in Table S-6 (with amino acid residues bonded to staples illustrated). In some embodiments, the olefin is Z. In some embodiments, the olefin is E. In some embodiments, an (i, i+3) staple is selected from Table S-1. In some embodiments, an (i, i+3) staple is selected from Table S-2. Those skilled in the art reading the present disclosure will appreciate that when staples in Table S-1 and Table S-2 are utilized for (i, i+3), “X₃” in those tables would be “X₂” (i.e., two amino acid residues instead of three amino acid residues). In some embodiments, an (i, i+4) staple is selected from Table S-1. In some embodiments, an (i, i+4) staple is selected from Table S-2. In some embodiments, an (i, i+7) staple is selected from Table S-3. In some embodiments, an (i, i+7) staple is selected from Table S-4.

TABLE S-1
Exemplary staples.

[chemical structure]

[chemical structure]

[chemical structure]

[chemical structure]

[chemical structure]

[chemical structure]

[chemical structure]

[chemical structure]

[chemical structure]

[chemical structure]

[chemical structure]

[chemical structure]

[chemical structure]

[chemical structure]

[chemical structure]

[chemical structure]

[chemical structure]

[chemical structure]

[chemical structure]

[chemical structure]

[chemical structure]

[chemical structure]

[chemical structure]

[chemical structure]

[chemical structure]

[chemical structure]

[chemical structure]

[chemical structure]

[chemical structure]

[chemical structure]

[chemical structure]

[chemical structure]

[chemical structure]

TABLE S-2
Exemplary staples.

[chemical structure]

[chemical structure]

[chemical structure]

[chemical structure]

[chemical structure]

[chemical structure]

[chemical structure]

[chemical structure]

[chemical structure]

[chemical structure]

[chemical structure]

[chemical structure]

[chemical structure]

[chemical structure]

[chemical structure]

[chemical structure]

[chemical structure]

[chemical structure]

[chemical structure]

[chemical structure]

[chemical structure]

[chemical structure]

[chemical structure]

[chemical structure]

[chemical structure]

[chemical structure]

[chemical structure]

[chemical structure]

[chemical structure]

[chemical structure]

[chemical structure]

[chemical structure]

[chemical structure]

TABLE S-3
Exemplary staples.

[chemical structure]

[chemical structure]

[chemical structure]

[chemical structure]

[chemical structure]

[chemical structure]

[chemical structure]

[chemical structure]

[chemical structure]

[chemical structure]

[chemical structure]

[chemical structure]

[chemical structure]

[chemical structure]

[chemical structure]

[chemical structure]

[chemical structure]

[chemical structure]

[chemical structure]

[chemical structure]

[chemical structure]

[chemical structure]

[chemical structure]

[chemical structure]

[chemical structure]

[chemical structure]

[chemical structure]

[chemical structure]

[chemical structure]

[chemical structure]

[chemical structure]

[chemical structure]

[chemical structure]

[chemical structure]

[chemical structure]

[chemical structure]

[chemical structure]

[chemical structure]

[chemical structure]

[chemical structure]

[chemical structure]

[chemical structure]

[chemical structure]

[chemical structure]

[chemical structure]

[chemical structure]

[chemical structure]

[chemical structure]

[chemical structure]

[chemical structure]

[chemical structure]

[chemical structure]

[chemical structure]

[chemical structure]

[chemical structure]

[chemical structure]

[chemical structure]

[chemical structure]

[chemical structure]

[chemical structure]

[chemical structure]

[chemical structure]

[chemical structure]

[chemical structure]

[chemical structure]

[chemical structure]

[chemical structure]

[chemical structure]

[chemical structure]

[chemical structure]

[chemical structure]

[chemical structure]

[chemical structure]

[chemical structure]

[chemical structure]

[chemical structure]

[chemical structure]

[chemical structure]

[chemical structure]

[chemical structure]

[chemical structure]

[chemical structure]

[chemical structure]

TABLE S-4
Exemplary staples.

[chemical structure]

[chemical structure]

[chemical structure]

[chemical structure]

[chemical structure]

[chemical structure]

[chemical structure]

[chemical structure]

[chemical structure]

[chemical structure]

[chemical structure]

[chemical structure]

[0211] In some embodiments, a staple may be one of the following, connecting the amino acids at the indicated position:

TABLE S-5
Certain amino acids and staples.

| Amino Acid | Amino Acid 2 | |
|---|---|---|
| 1 | (i + 7 | staple |
| Monomer A | [symbol] | [chemical structure] |
| Monomer A | S₇ | [chemical structure] |
| Monomer A | S₆ | [chemical structure] |
| R₈ | Monomer A | [chemical structure] |
| R₇ | Monomer A | [chemical structure] |
| R₆ | Sonomer A | [chemical structure] |
| Monomer E | [symbol] | [chemical structure] |
| Monomer E | S₇ | [chemical structure] |
| Monomer E | S₆ | [chemical structure] |
| Monomer E | S₅ | [chemical structure] |
| R₈ | Monomer D | [chemical structure] |
| R₇ | Monomer D | [chemical structure] |
| R₆ | Monomer D | [chemical structure] |
| R₅ | Monomer D | [chemical structure] |
| Monomer G | S₇ | [chemical structure] |
| Monomer G | S₆ | [chemical structure] |
| Monomer G | S₅ | [chemical structure] |
| Monomer G | S₄ | [chemical structure] |
| R₇ | Monomer F | [chemical structure] |
| R₆ | Monomer F | [chemical structure] |
| R₅ | Monomer F | [chemical structure] |
| [symbol] | Monomer F | [chemical structure] |
| R₄ | Monomer F | [chemical structure] |
| Monomer I | S₆ | [chemical structure] |
| Monomer I | S₅ | [chemical structure] |
| Monomer I | S₄ | [chemical structure] |
| Monomer I | S₃ | [chemical structure] |
| Monomer C | [symbol] | [chemical structure] |
| Monomer C | S₇ | [chemical structure] |
| Monomer C | S₆ | [chemical structure] |
| Monomer C | S₅ | [chemical structure] |
| R₈ | Monomer B | [chemical structure] |
| R₇ | Monomer B | [chemical structure] |
| R₆ | Monomer B | [chemical structure] |
| R₅ | Monomer B | [chemical structure] |
| R₃ | Monomer H | [chemical structure] |
| R₄ | Monomer H | [chemical structure] |
| R₅ | Monomer H | [chemical structure] |
| R₆ | Monomer H | [chemical structure] |
| Monomer G | S₇ | [chemical structure] |
| R₇ | Monomer F | [chemical structure] |
| Monomer I | S₆ | [chemical structure] |
| R₆ | Monomer H | [chemical structure] |
| Monomer A | Monomer B | [chemical structure] |
| Monomer A | Monomer C | [chemical structure] |
| Monomer A | Monomer A | [chemical structure] |
| Monomer A | Monomer F | [chemical structure] |
| Monomer A | Monomer E | [chemical structure] |
| Monomer A | Monomer G | [chemical structure] |
| Monomer A | Monomer I | [chemical structure] |
| Monomer I | Monomer A | [chemical structure] |
| Monomer G | Monomer A | [chemical structure] |
| Monomer E | Monomer A | [chemical structure] |
| Monomer F | Monomer A | [chemical structure] |
| Monomer C | Monomer A | [chemical structure] |
| Monomer B | Monomer A | [chemical structure] |
| Monomer B | Monomer B | [chemical structure] |
| Monomer B | Monomer F | [chemical structure] |
| Monomer C | Monomer F | [chemical structure] |
| Monomer C | Monomer C | [chemical structure] |
| Monomer C | Monomer B | [chemical structure] |
| Monomer C | Monomer E | [chemical structure] |
| Monomer C | Monomer G | [chemical structure] |
| Monomer C | Monomer I | [chemical structure] |
| Monomer I | Monomer F | [chemical structure] |
| Monomer I | Monomer G | [chemical structure] |
| Monomer I | Monomer E | [chemical structure] |
| Monomer I | Monomer B | [chemical structure] |
| Monomer I | Monomer C | [chemical structure] |
| Monomer I | Monomer I | [chemical structure] |
| Monomer G | Monomer F | [chemical structure] |
| Monomer G | Monomer G | [chemical structure] |
| Monomer G | Monomer E | [chemical structure] |
| Monomer G | Monomer B | [chemical structure] |
| Monomer G | Monomer C | [chemical structure] |
| Monomer G | Monomer I | [chemical structure] |
| Monomer E | Monomer F | [chemical structure] |
| Monomer E | Monomer G | [chemical structure] |
| Monomer E | Monomer E | [chemical structure] |
| Monomer E | Monomer B | [chemical structure] |
| Monomer E | Monomer C | [chemical structure] |
| Monomer E | Monomer I | [chemical structure] |
| Monomer F | Monomer F | [chemical structure] |
| Monomer F | Monomer B | [chemical structure] |
| R₇ | Monomer A | [chemical structure] |
| Monomer E | [symbol] | [chemical structure] |
| R₈ | Monomer D | [chemical structure] |
| R₇ | Monomer D | [chemical structure] |
| R₇ | Monomer F | [chemical structure] |
| R₆ | Monomer F | [chemical structure] |
| Monomer I | [symbol] | [chemical structure] |
| Monomer I | [symbol] | [chemical structure] |
| R₈ | Monomer B | [chemical structure] |
| R₄ | Monomer H | [chemical structure] |
| R₅ | Monomer H | [chemical structure] |
| R₆ | Monomer H | [chemical structure] |

[symbol]

indicates data missing or illegible when filed

[0212] In some embodiments, it is C to N. In some embodiments, a double bond is E. In some embodiments, a double bond is Z. In some embodiments, a staple is a (i, i+3) staple. In some embodiments, a staple is a (i, i+4) staple. In some embodiments, a staple is a (i, i+7) staple. In some embodiments, each double is independently E or Z when a structure comprises more than one double bond. In some embodiments, each staple is independently a (i, i+3) or a (i, i+4) staple or a (i, i+7) staple. In some embodiments, each staple is independently a (i, i+4) staple or a (i, i+7) staple in a structure comprising two staples. In some embodiments, one staple is a (i, i+4) staple and the other is a (i, i+7) staple. In some embodiments, a PL3 residue is bonded to a (i, i+3) staple. In some embodiments, a PL3 residue is bonded to a (i, i+4) staple. In some embodiments, staples (e.g., those in Table 6) are formed by metathesis of double bonds in side chains of amino acid residues, e.g., RdN and S7, R8 and PyrS, R5 and SeN, R6 and SeN, ReN and S5, ReN and S6, R7 and PyrS, Az and S7, R8 and SgN, Az and S8, R4 and SeN, R5 and SdN, R7 and Az, R8 and Az, RdN and S4, RgN and S8, RgN and S7, R8 and S5, PL3 and B5 and the same B5 and S8, PL3 and B5 and the same B5 and SeN, PL3 and B5 and the same B5 and SdN, PL3 and B5 and the same B5 and S7, PL3 and B5 and the same B5 and PyrS2, PL3 and B5 and the same B5 and PyrS3, R5 and PyrS2, PL3 and B5 and the same B5 and PyrS1, PL3 and B5 and the same B5 and S10, PL3 and B5 and the same B5 and PyrR2, PL3 and B5 and the same B5 and PyrS, PL3 and B5 and the same B5 and Az, PL3 and B5 and the same B5 and SeNc5, HypEs5 and B5 and the same B5 and PyrS2, HypEs4 and B5 and the same B5 and PyrS2, ProSAm3 and B5 and the same B5 and PyrS2, ProAm5 and B5 and the same B5 and PyrS2, ProAm6 and B5 and the same B5 and PyrS2, BzAm3Oallyl and B5 and the same B5 and PyrS2, HypBzEs3OAllyl and B5 and the same B5 and PyrS2, ProBzAm3OAllyl and B5 and the same B5 and PyrS2, PAc3OAllyl and B5 and the same B5 and PyrS2, ProPAc3OAllyl and B5 and the same B5 and PyrS2, HypPAc3OAllyl and B5 and the same B5 and PyrS2, Bn3OAllyl and B5 and the same B5 and PyrS2, R3 and B5 and the same B5 and PyrS2, R5 and B5 and the same B5 and PyrS2, BzAm2Allyl-MePro and B5 and the same B5 and PyrS2, PL3 and B5 and the same B5 and SPip1, PL3 and B5 and the same B5 and SPip2, PL3 and B5 and the same B5 and SPip3, PL3 and B5 and the same B5 and Az2, PL3 and B5 and the same B5 and Az3, PL3 and S5, R5 and S5, PL3 and B4 and the same B4 and PyrS1, PL3 and B4 and the same B4 and PyrS2, PL3 and B4 and the same B4 and PyrS3, PL3 and S6, PL3 and S4, PL3 and S3, R6 and PyrS2, R4 and PyrS2, R3 and PyrS2, PL3 and B3 and the same B3 and PyrS2, PL3 and B3 and the same B3 and PyrS3, PL3 and B3 and the same B3 and PyrS4, PL3 and B6 and the same B6 and PyrS, PL3 and B6 and the same B6 and PyrS1, PL3 and B6 and the same B6 and PyrS2, 5hexenyl-MePro and B5 and the same B5 and PyrS2, 4pentenyl-MePro and B5 and the same B5 and PyrS2, 3butenyl-MePro and B5 and the same B5 and PyrS2.

TABLE S-6
Certain staples (including amino acid residues bonded to staples).

[chemical structure]

[chemical structure]

[chemical structure]

[chemical structure]

[chemical structure]

[chemical structure]

[chemical structure]

[chemical structure]

[chemical structure]

[chemical structure]

[chemical structure]

[chemical structure]

[chemical structure]

[chemical structure]

[chemical structure]

[chemical structure]

[chemical structure]

[chemical structure]

[chemical structure]

[chemical structure]

[chemical structure]

[chemical structure]

[chemical structure]

[chemical structure]

[chemical structure]

[chemical structure]

[chemical structure]

[chemical structure]

[chemical structure]

[chemical structure]

[chemical structure]

[chemical structure]

[chemical structure]

[chemical structure]

[chemical structure]

[chemical structure]

[chemical structure]

[chemical structure]

[chemical structure]

[chemical structure]

[chemical structure]

[chemical structure]

[chemical structure]

[chemical structure]

[chemical structure]

[chemical structure]

[chemical structure]

[chemical structure]

[chemical structure]

[chemical structure]

[chemical structure]

[chemical structure]

[chemical structure]

[chemical structure]

[chemical structure]

[chemical structure]

[chemical structure]

[chemical structure]

[chemical structure]

[chemical structure]

[chemical structure]

[chemical structure]

[chemical structure]

[chemical structure]

[chemical structure]

[chemical structure]

[chemical structure]

[chemical structure]

[chemical structure]

[chemical structure]

[chemical structure]

[chemical structure]

[chemical structure]

[chemical structure]

[chemical structure]

[chemical structure]

[chemical structure]

[chemical structure]

[chemical structure]

[chemical structure]

[chemical structure]

[chemical structure]

[chemical structure]

[chemical structure]

[chemical structure]

[chemical structure]

[chemical structure]

[chemical structure]

[chemical structure]

[chemical structure]

[chemical structure]

[chemical structure]

[chemical structure]

[chemical structure]

[chemical structure]

[chemical structure]

[chemical structure]

[chemical structure]

[chemical structure]

[chemical structure]

[chemical structure]

[chemical structure]

[chemical structure]

[chemical structure]

[chemical structure]

[chemical structure]

[chemical structure]

[chemical structure]

[chemical structure]

[chemical structure]

[chemical structure]

[chemical structure]

[chemical structure]

[chemical structure]

[chemical structure]

[chemical structure]

[chemical structure]

[chemical structure]

[chemical structure]

[chemical structure]

[chemical structure]

[chemical structure]

[chemical structure]

[chemical structure]

[chemical structure]

[chemical structure]

[chemical structure]

[chemical structure]

[chemical structure]

[chemical structure]

[chemical structure]

[chemical structure]

[chemical structure]

[chemical structure]

[chemical structure]

[chemical structure]

[0213] In some embodiments, a staple comprises —S—. In some embodiments, stapling technologies comprise utilization of one or more, e.g., two or more, sulfur-containing moieties. In some embodiments, a stapled peptide comprises cysteine stapling. In some embodiments, two cysteine residues are stapled wherein the —S— moieties of the two cysteine residues are connected optionally through a linker. In some embodiments, a stapled peptide comprises one and no more than one staples from cysteine stapling. In some embodiments, a stapled peptide comprises one and no more than one staples having the structure of

[chemical structure]

In some embodiments, a stapled peptide comprises one and no more than one staples having the structure of

[chemical structure]

In some embodiments, a stapled peptide comprises one and no more than one staples having the structure of

[chemical structure]

In some embodiments, a stapled peptide comprises one and no more than one staples having the structure of

[chemical structure]

In some embodiments, a stapled peptide comprises no staples having the structure of

[chemical structure]

In some embodiments, a stapled peptide comprises no staples having the structure of

[chemical structure]

In some embodiments, a stapled peptide comprises no staples having the structure of

[chemical structure]

In some embodiments, a stapled peptide comprises no staples having the structure of

[chemical structure]

[0214] In some embodiments, the present disclosure provides useful technologies relating to cysteine stapling. Among other things, the present disclosure appreciates that peptides amenable to cysteine stapling and/or comprising one or more cysteine staples, can be produced and/or assessed in a biological system. The present disclosure further appreciates that certain such systems permit development, production, and/or assessment of cysteine stapled peptides having a range of different structures (e.g., different amino acid sequences), and in fact can provide a user with complete control over selection and implementation of amino acid sequences to be incorporated into stapled peptides.

[0215] Cysteine stapling, as described herein, involves linking one cysteine residue to another cysteine residue, where the resulting bond is not through the peptide backbone between the linked cysteine residues.

[0216] In some embodiments, a stapled peptide as described herein comprises a staple which staple is L^{s}, wherein:
[0217] L^{s} is -L^{s1}-S-L^{s2}-S-L^{s3}-;
[0218] L^{s1} and L^{s3} are each independently L;
[0219] L^{s2} is L and comprises at least one —C(O)—; and
[0220] each L is independently a covalent bond, or an optionally substituted, bivalent C₁-C₂₅ aliphatic group wherein one or more methylene units of the aliphatic group are optionally and independently replaced with —C(R′)₂—, -Cy-, —O—, —S—, —S—S—, —N(R′)—, —C(O)—, —C(S)—, —C(NR′)—, —C(O)N(R′)—, —N(R′)C(O)N(R′)—, —N(R′)C(O)O—, —S(O)—, —S(O)₂—, —S(O)₂N(R′)—, —C(O)S—, or —C(O)O—;
[0221] each -Cy- is independently an optionally substituted bivalent group selected from a C₃₋₂₀ cycloaliphatic ring, a C₆₋₂₀ aryl ring, a 5-20 membered heteroaryl ring having 1-10 heteroatoms independently selected from oxygen, nitrogen, sulfur, phosphorus and silicon, and a 3-20 membered heterocyclyl ring having 1-10 heteroatoms independently selected from oxygen, nitrogen, sulfur, phosphorus and silicon;
[0222] each R′ is independently —R, —C(O)R, —CO₂R, or —SO₂R;
[0223] each R is independently —H, or an optionally substituted group selected from C₁₋₃₀ aliphatic, C₁₋₃₀ heteroaliphatic having 1-10 heteroatoms independently selected from oxygen, nitrogen, sulfur, phosphorus and silicon, C₆₋₃₀ aryl, C₆₋₃₀ arylaliphatic, C₆₋₃₀ arylheteroaliphatic having 1-10 heteroatoms independently selected from oxygen, nitrogen, sulfur, phosphorus and silicon, 5-30 membered heteroaryl having 1-10 heteroatoms independently selected from oxygen, nitrogen, sulfur, phosphorus and silicon, and 3-30 membered heterocyclyl having 1-10 heteroatoms independently selected from oxygen, nitrogen, sulfur, phosphorus and silicon, or
[0224] two R groups are optionally and independently taken together to form a covalent bond; or
[0225] two or more R groups on the same atom are optionally and independently taken together with the atom to form an optionally substituted, 3-30 membered, monocyclic, bicyclic or polycyclic ring having, in addition to the atom, 0-10 heteroatoms independently selected from oxygen, nitrogen, sulfur, phosphorus and silicon; or
[0226] two or more R groups on two or more atoms are optionally and independently taken together with their intervening atoms to form an optionally substituted, 3-30 membered, monocyclic, bicyclic or polycyclic ring having, in addition to the intervening atoms, 0-10 heteroatoms independently selected from oxygen, nitrogen, sulfur, phosphorus and silicon.

[0227] In some embodiments, L is independently a bivalent C₁-C₂₅ aliphatic group. In some embodiments, L is independently a bivalent C₁-C₂₀ aliphatic group. In some embodiments, L is independently a bivalent C₁-C₁₀ aliphatic group. In some embodiments, L is independently a bivalent C₁-C₅ aliphatic group. In some embodiments, L is independently a bivalent C₁ aliphatic group. In some embodiments, L is —CH₂.

[0228] In some embodiments, L^{s1} is —CH₂—. In some embodiments, L^{s3} is —CH₂—. In some embodiments, L^{s1} and L^{s3} are both —CH₂—. In some embodiments, L^{s} is —CH₂—S-L^{s2}-S—CH₂—.

[0229] In some embodiments, L^{s2} comprises —C(R′)₂-L′-C(R′)₂—, wherein L′ is described in the present disclosure. In some embodiments, L^{s2} is -L^{s1}-C(O)Q-L′-QC(O)-L^{x1}-, wherein each variable is independently as described in the present disclosure. In some embodiments, L^{s2} is —CH₂C(O)Q-L′-QC(O)CH₂—, wherein each —CH₂— is independently and optionally substituted. In some embodiments, L^{s2} is —CH₂C(O)Q-L′-QC(O)CH₂—.

[0230] In some embodiments, L^{s2} In some embodiments, L^{s2} is L and comprises at least one —C(O)—. In some embodiments, L^{s2} is L and comprises at least two —C(O)—. In some embodiments, L^{s2} is L and comprises at least one —C(O)Q-, wherein Q is selected from the group consisting of: a covalent bond, —N(R′)—, —O—, and —S—. In some embodiments, L^{s2} is L and comprises at least one —C(O)Q-, wherein Q is selected between —N(R′)— and —O—. In some embodiments, L^{s2} is L and comprises at least two —C(O)Q-, wherein Q is selected from the group consisting of: —N(R′)—, —O—, and —S—. In some embodiments, L^{s2} is L and comprises at least two —C(O)Q-, wherein Q is selected between —N(R′)— and —O—. In some embodiments, L^{s2} is L and comprises at least one —C(O)N(R′)—. In some embodiments, L^{s2} is L and comprises at least two —C(O)N(R′)—. In some embodiments, L^{s2} is L and comprises at least one —C(O)O—. In some embodiments, L^{s2} is L and comprises at least two —C(O)O—.

[0231] In some embodiments, L^{s2} comprises -Q-L′-Q-, wherein Q is independently selected from the group consisting of: —N(R′)—, —O—, and —S, wherein L′ is described in the present disclosure.

[0232] In some embodiments, L^{s2} comprises -Q-L′-Q-, wherein Q is independently selected between —N(R′)— and —O—, wherein L′ is described in the present disclosure. In some embodiments, L^{s2} comprises —C(O)Q-L′-QC(O)—, wherein Q is independently selected from the group consisting of: —N(R′)—, —O—, and —S, wherein L′ is described in the present disclosure. In some embodiments, L^{s2} comprises —C(O)Q-L′-QC(O)—, wherein Q is independently selected between —N(R′)— and —O, wherein L′ is described in the present disclosure. In some embodiments, L^{s2} comprises —C(R′)₂C(O)Q-L′-QC(O)C(R′)₂—, wherein Q is independently selected from the group consisting of: —N(R′)—, —O—, and —S, wherein L′ is described in the present disclosure. In some embodiments, L^{s2} comprises —C(R′)₂C(O)Q-L′-QC(O)C(R′)₂—, wherein Q is independently selected between —N(R′)— and —O, wherein L′ is described in the present disclosure.

[0233] In some embodiments, L^{s2} comprises —N(R′)-L′—N(R′)—, wherein L′ is described in the present disclosure. In some embodiments, L^{s2} comprises —C(O)N(R′)-L′—N(R′)C(O)—, wherein L′ is described in the present disclosure. In some embodiments, L^{s2} is —C(R′)₂C(O)N(R′)-L′—N(R′)C(O)C(R′)₂—, wherein L′ is described in the present disclosure.

[0234] In some embodiments, L^{s2} comprises —O(R′)-L′—O(R′)—, wherein L′ is described in the present disclosure. In some embodiments, L^{s2} comprises —C(O)O-L′—OC(O)—, wherein L′ is described in the present disclosure. In some embodiments, L^{s2} is —C(R′)₂C(O)O-L′—OC(O)C(R′)₂—, wherein L′ is described in the present disclosure.

[0235] In some embodiments, R′ is an optionally substituted C₁-30 aliphatic. In some embodiments, R′ is an optionally substituted C₁₋₁₅ aliphatic. In some embodiments, R′ is an optionally substituted C₁₋₁₀ aliphatic. In some embodiments, R′ is an optionally substituted C₁₋₅ aliphatic. In some embodiments, R′ is hydrogen.

[0236] In some embodiments, L′ is optionally substituted bivalent C₁-C₁₉ aliphatic. In some embodiments, L′ is optionally substituted bivalent C₁-C₁₅ aliphatic. In some embodiments, L′ is optionally substituted bivalent C₁-C₁₀ aliphatic. In some embodiments, L′ is optionally substituted bivalent C₁-C₉ aliphatic. In some embodiments, L′ is optionally substituted bivalent C₁-C₅ aliphatic. In some embodiments, L′ is optionally substituted bivalent C₁-C₇ aliphatic. In some embodiments, L′ is optionally substituted bivalent C₁-C₆ aliphatic. In some embodiments, L′ is optionally substituted bivalent C₁-C₅ aliphatic. In some embodiments, L′ is optionally substituted bivalent C₁-C₃ aliphatic. In some embodiments, L′ is optionally substituted bivalent C₁-C₂ aliphatic. In some embodiments, L′ is optionally substituted bivalent C₁ aliphatic. In some embodiments, L′ is —CH₂—. In some embodiments, L′ is —(CH₂)₂—. In some embodiments, L′ is —(CH₂)₃—. In some embodiments, L′ is —(CH₂)₄—. In some embodiments, L′ is —(CH₂)₅—. In some embodiments, L′ is —(CH₂)₆—. In some embodiments, L′ is —(CH₂)₇—. In some embodiments, L′ is —(CH₂)₈—.

[0237] In some embodiments, L′ is optionally substituted bivalent C₆₋₂₀ aryl ring. In some embodiments, L′ is optionally substituted bivalent C₆₋₁₄ aryl ring. In some embodiments, L′ is optionally substituted bivalent C₆₋₁₀ aryl ring. In some embodiments, L′ is optionally substituted bivalent C₆ aryl ring. In some embodiments, L′ is bivalent C₆ aryl substituted with at least one halogen. In some embodiments, L′ is bivalent C₆ aryl substituted with at least two halogen. In some embodiments, L′ is bivalent C₆ aryl substituted with at least three halogen. In some embodiments, L′ is bivalent C₆ aryl substituted with four halogen. In some embodiments, L′ is bivalent C₆ aryl substituted with at least one fluorine. In some embodiments, L′ is bivalent C₆ aryl substituted with at least two fluorine. In some embodiments, L′ is bivalent C₆ aryl substituted with at least three fluorine. In some embodiments, L′ is bivalent C₆ aryl substituted with four fluorine. In some embodiments, L′ is bivalent C₆ aryl substituted with at least one chlorine. In some embodiments, L′ is bivalent C₆ aryl substituted with at least two chlorine. In some embodiments, L′ is bivalent C₆ aryl substituted with at least three chlorine. In some embodiments, L′ is bivalent C₆ aryl substituted with four chlorine. In some embodiments, L′ is bivalent C₆ aryl substituted at with least one —O(CH₂)₀₋₄CH₃. In some embodiments, L′ is bivalent C₆ aryl substituted with at least two —O(CH₂)₀₋₄CH₃. In some embodiments, L′ is bivalent C₆ aryl substituted with at least three —O(CH₂)₀₋₄CH₃. In some embodiments, L′ is bivalent C₆ aryl substituted with four —O(CH₂)₀₋₄CH₃.

[0238] In some embodiments, L′ is bivalent 5-20 membered heteroaryl ring having 1-10 heteroatoms independently selected from oxygen, nitrogen, sulfur, phosphorus and silicon. In some embodiments, L′ is bivalent 5−6 membered heteroaryl ring having 1-4 heteroatoms independently selected from oxygen, nitrogen, sulfur, phosphorus and silicon. In some embodiments, L′ is bivalent 5−6 membered heteroaryl ring having 1-4 heteroatoms independently selected from oxygen, nitrogen, and sulfur. In some embodiments, L′ is bivalent 6 membered heteroaryl ring having 1-2 heteroatoms independently selected from oxygen, nitrogen, and sulfur. In some embodiments, L′ is bivalent 6 membered heteroaryl ring having 2 nitrogen.

[0239] In some embodiments, L′ is optionally substituted bivalent C₃₋₂₀ cycloaliphatic ring. In some embodiments, L′ is optionally substituted bivalent C₃₋₁₅ cycloaliphatic ring. In some embodiments, L′ is optionally substituted bivalent C₃₋₁₀ cycloaliphatic ring. In some embodiments, L′ is optionally substituted bivalent C₃₋₉ cycloaliphatic ring. In some embodiments, L′ is optionally substituted bivalent C₃₋₈ cycloaliphatic ring. In some embodiments, L′ is optionally substituted bivalent C₃₋₇ cycloaliphatic ring. In some embodiments, L′ is optionally substituted bivalent C₃₋₆ cycloaliphatic ring. In some embodiments, L′ is optionally substituted bivalent C₃-s cycloaliphatic ring. In some embodiments, L′ is optionally substituted bivalent C₃₋₄ cycloaliphatic ring. In some embodiments, L′ is optionally substituted bivalent C₃ cycloaliphatic ring. In some embodiments, L′ is optionally substituted bivalent C₄ cycloaliphatic ring. In some embodiments, L′ is optionally substituted bivalent C₅ cycloaliphatic ring. In some embodiments, L′ is optionally substituted bivalent C₅ cycloalkyl ring. In some embodiments, L′ is optionally substituted bivalent C₅ cycloalkenyl ring. In some embodiments, L′ is optionally substituted bivalent C₆ cycloaliphatic ring. In some embodiments, L′ is optionally substituted bivalent C₆ cycloalkyl ring.

[0240] In some embodiments, L^{s2} comprises —N(R′)-L′—N(R′)— and L′ is a covalent bond. In some embodiments L^{s2} comprises —N(R)—N(R)—, wherein:
[0241] each R is independently —H, or an optionally substituted group selected from C₁₋₃₀ aliphatic, C₁₋₃₀ heteroaliphatic having 1-10 heteroatoms independently selected from oxygen, nitrogen, sulfur, phosphorus and silicon, C₆₋₃₀ aryl, C₆₋₃₀ arylaliphatic, C₆₋₃₀ arylheteroaliphatic having 1-10 heteroatoms independently selected from oxygen, nitrogen, sulfur, phosphorus and silicon, 5-30 membered heteroaryl having 1-10 heteroatoms independently selected from oxygen, nitrogen, sulfur, phosphorus and silicon, and 3-30 membered heterocyclyl having 1-10 heteroatoms independently selected from oxygen, nitrogen, sulfur, phosphorus and silicon, or
[0242] two or more R groups on two or more atoms are optionally and independently taken together with their intervening atoms to form an optionally substituted, 3-30 membered, monocyclic, bicyclic or polycyclic ring having, in addition to the intervening atoms, 0-10 heteroatoms independently selected from oxygen, nitrogen, sulfur, phosphorus and silicon.

[0243] In some embodiments L^{s2} comprises —N(R)—N(R)—, wherein:
[0244] each R is independently optionally substituted C₁₋₃₀ aliphatic; or
[0245] two or more R groups on two or more atoms are optionally and independently taken together with their intervening atoms to form an optionally substituted, 3-30 membered monocyclic ring.

[0246] In some embodiments, L^{s2} is a staple selected from the group consisting of:

[chemical structure]

[0247] As those skilled in the art will appreciate, provided technologies can be utilized to prepare collection of peptides using non-cysteine residues and suitable chemistry therefor. For example, in some embodiments, cysteine stapling is replaced with lysine stapling, wherein the cysteine residues for cysteine stapling are replaced with lysine residues for lysine stapling (e.g., using agents that can crosslink two lysine residues, for example, through reactions with side chain amino groups). In some embodiments, for lysine stapling, RE in various formulae is or comprises an activated carboxylic acid group (e.g., NHS ester group), an imidoester group, etc. Suitable reagents are widely known in the art including many commercially available ones. In some embodiments, cysteine stapling is replaced with methionine stapling. In some embodiments, cysteine residues for cysteine stapling are replaced with methionine residues for methionine stapling. In some embodiments, cysteine stapling is replaced with tryptophan stapling. In some embodiments, cysteine residues for cysteine stapling are replaced with tryptophan residues for tryptophan stapling. As those skilled in the art will appreciate, various technologies (e.g., reagents, reactions, etc.) are described in the art and can be utilized in accordance with the present disclosure for, e.g., methionine stapling, tryptophan stapling, etc. In some embodiments, such stapling can be performed using reagents having various formulae described herein, wherein R^{E} is or comprises a group that are suitable for methionine and/or tryptophan stapling. In some embodiments, stapling may be performed using one residue at a first position, and a different residue at a second position. Useful reagents for such stapling may comprise a first reactive group for stapling at a first position (e.g., through a first R^{E}), and a second reactive group for stapling at a second position (e.g., through a second R^{E}).

[0248] In some embodiments, for various types of stapling (e.g., cysteine stapling, or non-cysteine stapling), stapling is between residues (e.g., cysteine residues for cysteine stapling) separated by two residues (i+3 stapling). In some embodiments, stapling is between residues separated by three residues (i+4 stapling). In some embodiments, stapling is between residues separated by six residues (i+7 stapling).

[0249] As appreciated by those skilled in the art, in some embodiments, more than two residues can be stapled at the same time. For example, in some embodiments, three or more cysteines are stapled using crosslinking reagents containing three or more reactive groups (e.g., R^{E} groups).

[0250] In some embodiments, as described herein, the present disclosure provides useful technologies relating to non-cysteine stapling. Among other things, the present disclosure appreciates that peptides amenable to cysteine stapling and/or comprising one or more non-cysteine staples, can have its cysteine residues and cysteine staple replaced with other amino acids and staples described herein (e.g. hydrocarbon and other non-hydrocarbon amino acid and staples). In some embodiments, the resulting non-cysteine stapled peptide maintains the same or similar interaction with a target of interest when compared to a reference cysteine stapled peptide.

[0251] Certain useful agents (peptides prior to stapling and stapled peptides post stapling) and compositions thereof are presented in Table E3 as examples, which includes various amino acid residues and N- and C-terminus capping groups for various positions as examples; also illustrated are various stapling patterns, e.g., X¹—X⁴—X¹¹, X³—X¹⁰, X⁴—X¹¹, X¹—X⁴ and X¹⁰—X¹⁴, X¹—X⁴ and X⁷—X¹⁴ etc. In some embodiments, a provided agent has a structure selected from Table E3 or a salt thereof. In some embodiments, a provided composition is a composition described in Table E3. As shown, e.g., in Tables E1 and E2 and the Figures, provided technologies can deliver improved useful properties and/or activities. For example, in some embodiments, a provided agent is a stapled peptide having the structure of

[chemical structure]

or a salt thereof. In some embodiments, a provided agent is a stapled peptide having the structure of

[chemical structure]

or a salt thereof. In some embodiments, a provided agent is a stapled peptide having the structure of

[chemical structure]

or a salt thereof. In some embodiments, a provided agent is a stapled peptide having the structure of

[chemical structure]

or a salt thereof. In some embodiments, a provided agent is a stapled peptide having the structure of

[chemical structure]

or a salt thereof. In some embodiments, a provided agent is a stapled peptide having the structure of

[chemical structure]

or a salt thereof.
In some embodiments, a double bond of a (i, i+3) staple is E. In some embodiments, a double bond of a (i, i+3) staple is Z. In some embodiments, a double bond of a (i, i+4) staple is E. In some embodiments, a double bond of a (i, i+4) staple is Z. In some embodiments, a double bond of a (i, i+7) staple is E. In some embodiments, a double bond of a (i, i+7) staple is Z. In some embodiments, both double bonds are E. In some embodiments, both double bonds are Z. In some embodiments, a (i, i+3) staple is E, and the other is Z. In some embodiments, a (i, i+3) staple is Z, and the other is E.

[0252] Agents, e.g., peptides including stapled peptides, can contain various numbers of amino acid residues. In some embodiments, a length of a peptide agent is about 5-20, 5-19, 5-18, 5-17, 5-16, 5-15, 10-20, 10-19, 10-18, 10-17, 10-16, 10-15, 11-20, 11-19, 11-18, 11-17, 11-16, 11-15, 12-20, 12-19, 12-18, 12-17, 12-16, 12-15, 13-20, 13-19, 13-18, 13-17, 13-16, 13-15, 14-20, 14-19, 14-18, 14-17, 14-16, 14-15, or about 2, 3, 4, 5, 6, 7, 8, 9, 10, 11, 12, 13, 14, 15, 16, 17, 18, 19, or 20 amino acid residues. In some embodiments, a length is about 10 amino acid residues. In some embodiments, a length is about 11 amino acid residues. In some embodiments, a length is about 12 amino acid residues. In some embodiments, a length is about 13 amino acid residues. In some embodiments, a length is about 14 amino acid residues. In some embodiments, a length is about 15 amino acid residues. In some embodiments, a length is about 16 amino acid residues. In some embodiments, a length is about 17 amino acid residues. In some embodiments, a length is about 18 amino acid residues. In some embodiments, a length is about 19 amino acid residues. In some embodiments, a length is about 20 amino acid residues.

[0253] Certain useful staples are described in the “Agents” section, below.

### Beta-Catenin

[0254] Among other things, the present disclosure provides technologies for modulating one or more beta-catenin functions. In some embodiments, the present disclosure provides useful technologies for inhibiting one or more beta-catenin functions that are associated with cancer or hyperplasia. In some embodiments, provided technologies are useful for preventing and treating conditions, disorders or diseases whose prevention and/or treatment will benefits from inhibition of beta-catenin. In some embodiments, a condition, disorder or disease is cancer.

[0255] Beta-catenin is reported to have various functions. For example, it can regulate and coordinate transcription of various genes. It is reported that high beta-catenin activity and/or expression levels may contribute to the development various conditions, disorders or diseases including cancer. Mutations and overexpression of beta-catenin are reported to be associated with conditions, disorders or diseases including many cancers including colorectal cancer, lung cancer, and breast cancer. Dysregulation of the Wnt/β-catenin signaling pathway has reportedly been linked to a number of conditions, disorders or diseases, including neurodegenerative diseases, psychiatric diseases, cancers, asthma, and even wound healing. Agents that can modulate beta-catenin functions are useful for various purposes including preventing and/or treating various conditions, disorders or diseases associated with beta-catenin.

### Binding Sites

[0256] Beta-catenin may interact with various agents at various binding sites each independently comprising a set of amino acid residues that interact with binding agents. For example, certain binding sites are utilized for beta-catenin interactions with Axin, APC, C-cadherin, E-cadherin, TCF3, and Bcl9. For interactions with TCF3, it has been reported that two or more binding sites may be utilized simultaneously to interact with different portions of TCF3. See, e.g., Graham et al. Cell, Vol. 103, 885-896, 2000.

[0257] In some embodiments, provided agents bind to beta-catenin at a unique binding site. In some embodiments, provided agents interact with beta-catenin at a set of amino acid residues that are different from previously reported binding sites, e.g., those for Axin, APC, C-cadherin, E-cadherin, TCF3 or Bcl9.

[0258] For example, in some embodiments, provided agents interact with one or more or all (e.g., about 1-23, 1-20, 1-15, 1-10, 1-5, 5-23, 5-20, 5-15, 5-10, 6-23, 6-20, 6-15, 6-10, 7-23, 7-20, 7-15, 7-10, 8-23, 8-20, 8-15, 8-10, 9-23, 9-20, 9-15, 9-10, 10-23, 10-20, 10-15, 11-23, 11-20, 11-15, 12-23, 12-20, 12-15, 13-23, 13-20, 13-15, 13-23, 14-20, 15-23, 15-20, 16-23, 16-20, 17-23, 17-20, 18-23, or 18-20, or about 1, 2, 3, 4, 5, 6, 7, 8, 9, 10, 11, 12, 13, 14, 15, 16, 17, 18, 19, 20, 21, 22, or 23, etc.) of a set of amino acid residues that are or correspond to amino acid residues in SEQ ID NO: 1, e.g., in some embodiments, the following amino acid residues of SEQ ID NO: 1: A305, Y306, G307, N308, Q309, K312, R342, K345, V346, V349, Q375, R376, Q379, N380, L382, W383, R386, N387, D413, N415, V416, T418, and C419. In some embodiments, a set of amino acid residues are or correspond to amino acid residues A305, Y306, G307, N308, Q309, K312, R342, K345, V346, V349, Q375, Q379, N380, L382, W383, R386, N387, D413, N415, V416, T418, and C419 of SEQ ID NO: 1. In some embodiments, a set of amino acid residues are or correspond to amino acid residues A305, Y306, G307, N308, Q309, K312, K345, V346, V349, Q379, N380, L382, W383, R386, N387, D413, N415, V416, T418, and C419 of SEQ ID NO: 1. In some embodiments, a set of amino acid residues are or correspond to amino acid residues G307, K312, K345, W383, N387, D413, and N415 of SEQ ID NO: 1. In some embodiments, a set of amino acid residues are or correspond to amino acid residues G307, K312, K345, W383, and N387 of SEQ ID NO: 1. In some embodiments, a set of amino acid residues are or correspond to amino acid residues Y306, G307, K312, R386 and N387 of SEQ ID NO: 1. In some embodiments, provided agents interact with Y306 or an amino acid residue corresponding thereto. In some embodiments, provided agents interact with G307 or an amino acid residue corresponding thereto. In some embodiments, provided agents interact with K312 or an amino acid residue corresponding thereto. In some embodiments, provided agents interact with K345 or an amino acid residue corresponding thereto. In some embodiments, provided agents interact with R386 or an amino acid residue corresponding thereto. In some embodiments, provided agents interact with W383 or an amino acid residue corresponding thereto. In some embodiments, provided agents interact with N387 or an amino acid residue corresponding thereto.

[0259] In some embodiments, a present agent interacts with a polypeptide whose sequence comprises or is SEQ ID NO: 2:

(SEQ ID NO: 2)
SVLFYAITTLHNLLLHQEGAKMAVRLAGGLQKMVALLNKTNVKFLAITTD
CLQILAYGNQESKLIILASGGPQALVNIMRTYTYEKLLWTTSRVLKVLSV
CSSNKPAIVEAGGMQALGLHLTDPSQRLVQNCLWTLRNLSDAATKQEGME
GLLGTLVQLLGSDDINVVTCAAGILSNLTCNNYKNKMMVCQVGGIEALVR
T.

[0260] In some embodiments, all amino acid residues that interact with a provided agent is with SEQ ID NO: 2. In some embodiments, amino acid residues that interact with a provided agent (e.g., one or more amino acid residues in an agent) interacts with an agent through hydrogen bonding, hydrophobic interactions or salt bridge. As appreciated by those skilled in the art, when two amino acid residues interacting with each other, they are typically within a certain range of distances when, e.g., assessed using crystallography, NMR, etc.

[0261] In some embodiments, certain amino acid residues reported to interact with one or more polypeptides are not significantly involved in interactions between provided and beta-catenin. In some embodiments, provided agents do not interact with an Axin binding site. In some embodiments, provided agents do not interact with a Bcl9 binding site. In some embodiments, provided agents do not interact with one or more or all of amino acid residues that are or correspond to N426, C429, K435, R469, H470, S473, R474, K508 and N516 of SEQ ID NO: 1. In some embodiments, provided agents do not interact with N426 or an amino acid residue corresponding thereto. In some embodiments, provided agents do not interact with C429 or an amino acid residue corresponding thereto. In some embodiments, provided agents do not interact with K435 or an amino acid residue corresponding thereto. In some embodiments, provided agents do not interact with R469 or an amino acid residue corresponding thereto. In some embodiments, provided agents do not interact with H470 or an amino acid residue corresponding thereto. In some embodiments, provided agents do not interact with S473 or an amino acid residue corresponding thereto. In some embodiments, provided agents do not interact with R474 or an amino acid residue corresponding thereto. In some embodiments, provided agents do not interact with K508 or an amino acid residue corresponding thereto. In some embodiments, provided agents do not interact with N516 or an amino acid residue corresponding thereto.

[0262] In some embodiments, mutation of one or more amino acid residues outside of SEQ ID NO: 2 in beta-catenin does not significant/y (e.g., not exceeding 30%, 40%, 50%, 60%, 70%, 75%, 80%, 85%, 90% or more) reduce interactions of beta-catenin with a provided agent. In some embodiments, mutation of one or more or all of amino acid residues that are or correspond to N426, C429, K435, R469, H470, S473, R474, K508 and N516 of SEQ ID NO: 1 does not significantly reduce interactions of beta-catenin with a provided agent. In some embodiments, mutation of N426 or an amino acid residue corresponding thereto does not significantly reduce interaction of beta-catenin with an agent. In some embodiments, mutation of Q379 or an amino acid residue corresponding thereto (e.g., to Ala, Glu, Phe, Trp, etc.) does not significantly reduce interaction of beta-catenin with an agent.

[0263] In some embodiments, an agent binds to a TCF site of beta-catenin. In some embodiments, an agent interacts with one or more but not all amino acid residues that interact with TCF. In some embodiments, an agent interacts with one or more but not all amino acid residues that interact with an extended region of XTcf3-CBD. In some embodiments, an agent does not interact with beta-catenin amino acid residues that interact with a beta-hairpin module of XTcf3-CBD. In some embodiments, an agent does not interact with beta-catenin amino acid residues that interact with a helix module of XTcf3-CBD. For certain amino acid residues that interact various modules of XTcF3-CBD, see, e.g., Graham et al. Cell, Vol. 103, 885-896, 2000.

[0264] In some embodiments, an agent competes with TCF for beta-catenin binding. In some embodiments, an agent competes with an extended region of TCF (e.g., Ala14-Glu24, or Asp16-Glu24, as described in Graham et al. Cell, Vol. 103, 885-896, 2000) for beta-catenin binding. In some embodiments, compared to an extended region of TCF, an agent does not compete, or competes at a less degree, with Axin for beta-catenin binding. In some embodiments, compared to an extended region of TCF, an agent does not compete, or competes at a less degree, with Bcl9 for beta-catenin binding. In some embodiments, compared to an extended region of TCF, an agent does not compete, or competes at a less degree, with a beta-hairpin module of XTcf3-CBD for beta-catenin binding. In some embodiments, compared to an extended region of TCF, an agent does not compete, or competes at a less degree, with a helix module of XTcf3-CBD for beta-catenin binding. In some embodiments, an agent competes with E-cadherin for beta-catenin binding.

[0265] In some embodiments, the present disclosure provides complexes of peptides (e.g., polypeptides whose sequences are or comprises SEQ ID NO: 1 or 2) and provided agents. In some embodiments, in such complexes polypeptides and provided agents interact with one or more or all amino acid residues as described herein, and optionally do not interact with one or more or all amino acid residues as described herein.

[0266] In some embodiments, the present disclosure provides complexes comprising a provided agent and a beta-catenin polypeptide or a portion thereof. In some embodiments, a portion thereof comprises one or more or all of the interacting residues as described herein. In some embodiments, an agent and a beta-catenin polypeptide or a portion thereof interact with other at one or more or all of the interacting residues.

### Certain Agents

[0267] In some embodiments, the present disclosure provides an agent having the structure of formula I:

R^{N}-L^{P1}-L^{AA1}-L^{P2}L^{AA2}-L^{P3}-L^{AA3}-L^{P4}-L^{AA4}-L^{P5}-L^{AA5}-L^{P6}-L^{AA6}-L^{P7}-R^{C} I

or a salt thereof, wherein:
[0268] R^{N} is a peptide, an amino protecting group or R′-L^{RN}-.
[0269] each of L^{P1}, L^{P2}, L^{P3}, L^{P4}, L^{P5}, L^{P6}, and L^{P7} is independently L, wherein L^{P1}, L^{P2}, L^{P3}, L^{P4}, L^{P5}, L^{P6}, and L^{P7} comprise:
   [0270] a first R′ group and a second R′ group which are taken together to form -L^{s}- which is bonded to the atom to which a first R′ group is attached and the atom to which a second R′ group is attached; and
   [0271] a third R′ group and a fourth R′ group which are taken together to form -L^{s}- which is bonded to the atom to which a third R′ group is attached and the atom to which a fourth R′ group is attached;
[0272] each L^{s} is independently -L^{s1}-L^{s2}-L^{s3}-, wherein each L^{s1}, L^{s2} and L^{s3} is independently L;
[0273] L^{AA1} is an amino acid residue that comprises a side chain comprising an acidic or polar group;
[0274] L^{AA2} is an amino acid residue that comprises a side chain comprising an acidic or polar group;
[0275] L^{AA3} is an amino acid residue;
[0276] L^{AA4} is an amino acid residue that comprises a side chain comprising an optionally substituted aromatic group;
[0277] L^{AA5} is an amino acid residue that comprises a side chain comprising an optionally substituted aromatic group;
[0278] L^{AA6} is an amino acid residue that comprises a side chain comprising an optionally substituted aromatic group;
[0279] R^{C} is a peptide, a carboxyl protecting group, -L^{RC}-R′, —O-L^{RC}-R′ or —N(R′)-L^{RC}-R′;
[0280] each of L^{RN} and L^{RC} is independently L;
[0281] each L is independently a covalent bond, or an optionally substituted, bivalent C₁-C₂₅ aliphatic or heteroaliphatic group having 1-10 heteroatoms, wherein one or more methylene units of the group are optionally and independently replaced with —C(R′)₂—, -Cy-, —O—, —S—, —S—S—, —N(R′)—, —C(O)—, —C(S)—, —C(NR′)—, —C(O)N(R′)—, —N(R′)C(O)N(R′)—, —N(R′)C(O)O—, —S(O)—, —S(O)₂—, —S(O)₂N(R′)—, —C(O)S—, or —C(O)O—;
[0282] each -Cy- is independently an optionally substituted bivalent, 3-30 membered, monocyclic, bicyclic or polycyclic ring having 0-10 heteroatoms;
[0283] each R′ is independently -L-R, —C(O)R, —CO₂R, or —SO₂R;
[0284] each R is independently —H, or an optionally substituted group selected from C₁₋₃₀ aliphatic, C₁₋₃₀ heteroaliphatic having 1-10 heteroatoms, C₆₋₃₀ aryl, C₆₋₃₀ arylaliphatic, C₆₋₃₀ arylheteroaliphatic having 1-10 heteroatoms, 5-30 membered heteroaryl having 1-10 heteroatoms, and 3-30 membered heterocyclyl having 1-10 heteroatoms, or
[0285] two R groups are optionally and independently taken together to form a covalent bond, or:
[0286] two or more R groups on the same atom are optionally and independently taken together with the atom to form an optionally substituted, 3-30 membered, monocyclic, bicyclic or polycyclic ring having, in addition to the atom, 0-10 heteroatoms; or
[0287] two or more R groups on two or more atoms are optionally and independently taken together with their intervening atom(s) to form an optionally substituted, 3-30 membered, monocyclic, bicyclic or polycyclic ring having, in addition to the intervening atom(s), 0-10 heteroatoms.

[0288] In some embodiments, the present disclosure provides an agent having the structure of formula I:

R^{N}-L^{P1}-L^{AA1}-L^{P2}L^{AA2}-L^{P3}-L^{AA3}-L^{P4}-L^{AA4}-L^{P5}-L^{AA5}-L^{P6}-L^{AA6}-L^{P7}-R^{C} I

or a salt thereof, wherein:
[0289] R^{N} is a peptide, an amino protecting group or R′-L^{RN}-;
[0290] each of L^{P1}, L^{P2}, L^{P3}, L^{P4}, L^{P5}, L^{P6}, and L^{P7} is independently L, wherein L^{P1}, L^{P2}, L^{P3}, L^{P4}, L^{P5}, L^{P6}, and L^{P7} comprise:
   [0291] a first R′ group and a second R′ group which are taken together to form -L^{s}- which is bonded to the atom to which a first R′ group is attached and the atom to which a second R′ group is attached; and
   [0292] a third R′ group and a fourth R′ group which are taken together to form -L^{s}- which is bonded to the atom to which a third R′ group is attached and the atom to which a fourth R′ group is attached;
[0293] each L^{s} is independently -L^{s1}-L^{s2}-L^{s3}-, wherein each LSL, L^{s2} and L^{s3} is independently L;
[0294] L^{AA1} is L^{AR}, wherein a methylene unit is replaced with —C(R′)(R^{AS})—, wherein R^{AS} is -L^{AS1}-R^{AA1} wherein R^{AA1} is —CO₂R or —SO₂R;
[0295] L^{AA2} is L^{AR}, wherein a methylene unit is replaced with —C(R′)(R^{AS})—, wherein R^{AS} is -L^{AS2}-R^{AA2} wherein R^{AA2} is —CO₂R or —SO₂R;
[0296] L^{AA3} is L^{AR}, wherein a methylene unit is replaced with —C(R′)(R^{AS})—, wherein R^{AS} is -L^{AS3}-R^{AA3} wherein R^{AA3} is R′;
[0297] L^{AA4} is L^{AR}, wherein a methylene unit is replaced with —C(R′)(R^{AS})—, wherein R^{AS} is -L^{AS4}-R^{AA4} wherein R^{AA4} is an optionally substituted group selected from 6-14 membered aryl or 5-14 membered heteroaryl having 1−6 heteroatoms;
[0298] L^{AA5} is L^{AR}, wherein a methylene unit is replaced with —C(R′)(R^{AS})—, wherein R^{AS} is -L^{AS5}-R^{AA5}wherein R^{AA5} is an optionally substituted group selected from 6-14 membered aryl or 5-14 membered heteroaryl having 1−6 heteroatoms;
[0299] L^{AA6} is L^{AR}, wherein a methylene unit is replaced with —C(R′)(R^{AS})—, wherein R^{AS} is -L^{AS6}R^{AA6}, wherein R^{AA6} is an optionally substituted group selected from 6-14 membered aryl or 5-14 membered heteroaryl having 1−6 heteroatoms;
[0300] R^{C} is a peptide, a carboxyl protecting group, -L^{RC}-R′, —O-L^{RC}-R′ or —N(R′)-L^{RC}-R′;
[0301] each of L^{RN} and L^{RC} is independently L;
[0302] each L^{A}R is independently an optionally substituted, bivalent C₁-C₄ aliphatic group, wherein one or more methylene units of the group are optionally and independently replaced with —C(R′)₂—, —C(R′)(R^{AS})—, -Cy-, —O—, —S—, —S—S—, —N(R′)—, —C(O)—, —C(S)—, —C(NR′)—, —C(O)N(R′)—, —N(R′)C(O)N(R′)—, —N(R′)C(O)O—, —S(O)—, —S(O)₂—, —S(O)₂N(R′)—, —C(O)S—, or —C(O)O—;
[0303] each of L^{AS1}, L^{AS2}, L^{AS3}, L^{AS4}, L^{AS5}, and L^{AS6} is independently L^{AS};
[0304] each R^{AS} is independently -L^{AS}-R′;
[0305] each L^{AS} is independently an optionally substituted, bivalent C₁-C₁₀ aliphatic or heteroaliphatic group having 1-5 heteroatoms, wherein one or more methylene units of the group optionally and independently replaced with —C(R′)₂—, -Cy-, —O—, —S—, —S—S—, —N(R′)—, —C(O)—, —C(S)—, —C(NR′)—, —C(O)N(R′)—, —N(R′)C(O)N(R′)—, —N(R′)C(O)O—, —S(O)—, —S(O)₂—, —S(O)₂N(R′)—, —C(O)S—, or —C(O)O—;
[0306] each L is independently a covalent bond, or an optionally substituted, bivalent C₁-C₂₅ aliphatic or heteroaliphatic group having 1-10 heteroatoms, wherein one or more methylene units of the group are optionally and independently replaced with —C(R′)₂—, -Cy-, —O—, —S—, —S—S—, —N(R′)—, —C(O)—, —C(S)—, —C(NR′)—, —C(O)N(R′)—, —N(R′)C(O)N(R′)—, —N(R′)C(O)O—, —S(O)—, —S(O)₂—, —S(O)₂N(R′)—, —C(O)S—, or —C(O)O—;
[0307] each -Cy- is independently an optionally substituted bivalent, 3-30 membered, monocyclic, bicyclic or polycyclic ring having 0-10 heteroatoms;
[0308] each R′ is independently -L-R, —C(O)R, —CO₂R, or —SO₂R;
[0309] each R is independently —H, or an optionally substituted group selected from C₁₋₃₀ aliphatic, C₁₋₃₀ heteroaliphatic having 1-10 heteroatoms, C₆₋₃₀ aryl, C₆₋₃₀ arylaliphatic, C₆₋₃₀ arylheteroaliphatic having 1-10 heteroatoms, 5-30 membered heteroaryl having 1-10 heteroatoms, and 3-30 membered heterocyclyl having 1-10 heteroatoms, or
[0310] two R groups are optionally and independently taken together to form a covalent bond, or:
[0311] two or more R groups on the same atom are optionally and independently taken together with the atom to form an optionally substituted, 3-30 membered, monocyclic, bicyclic or polycyclic ring having, in addition to the atom, 0-10 heteroatoms; or
[0312] two or more R groups on two or more atoms are optionally and independently taken together with their intervening atom(s) to form an optionally substituted, 3-30 membered, monocyclic, bicyclic or polycyclic ring having, in addition to the intervening atom(s), 0-10 heteroatoms.

[0313] In some embodiments, a second R′ group and a third R′ group are attached to the same atom. In some embodiments, none of the first, second and fourth R′ groups are attached to the same atom. In some embodiments, each of the first, second, third and fourth R′ groups is independently attached to a different atom.

[0314] In some embodiments, a compound of formula I is a stapled peptide as described herein.

[0315] In some embodiments, each L^{s} is independently a staple as described herein. In some embodiments, L^{s}, e.g., L^{s} formed by taking the first and the second R′ groups, has a length of 5-20 (e.g., 5, 6, 7, 8, 9, 10, 11, 12, 13, 14, 15, 16, 17, 18, 19, or 20) atoms. Unless specified otherwise, a length between two connection sites, e.g., of L^{s}, L, etc., is the shortest covalent connection from one site to the other. For example, the length of —CH₂—CH₂— is 2 atoms (—C—C—), the length of 1, 3-phenylene is 3 atoms. In some embodiments, L^{s}, e.g., L^{s} formed by taking the third and the fourth R′ groups, has a length of 5-20 (e.g., 5, 6, 7, 8, 9, 10, 11, 12, 13, 14, 15, 16, 17, 18, 19, or 20) atoms. Those skilled in the art reading the present disclosure will appreciate that staples, e.g., L^{s}, connecting two atoms having a longer distance typically has a longer length than staples connecting two atom having a shorter distance, e.g., (i, i+7) staples typically have longer lengths than (i, i+3) or (i, i+4) staples. In some embodiments, a length is 5 atoms. In some embodiments, a length is 6 atoms. In some embodiments, a length is 7 atoms. In some embodiments, a length is 8 atoms. In some embodiments, a length is 9 atoms. In some embodiments, a length is 10 atoms. In some embodiments, a length is 11 atoms. In some embodiments, a length is 12 atoms. In some embodiments, a length is 13 atoms. In some embodiments, a length is 14 atoms. In some embodiments, a length is 15 atoms. In some embodiments, a length is 16 atoms. In some embodiments, a length is 17 atoms. In some embodiments, a length is 18 atoms. In some embodiments, a length is 19 atoms. In some embodiments, a length is 20 atoms.

### L^{P1}

[0316] In some embodiments, L^{P1} is a covalent bond, or an optionally substituted, bivalent C₂-C₆ aliphatic group, wherein one or more methylene units of the group are optionally and independently replaced with —C(R′)₂—, -Cy-, —O—, —S—, —N(R′)—, —C(O)—, —C(S)—, —C(NR′)—, —C(O)N(R′)—, —N(R′)C(O)N(R′)—, —N(R′)C(O)O—, —S(O)—, —S(O)₂—, —S(O)₂N(R′)—, —C(O)S—, or —C(O)O—. In some embodiments, the length of L^{P1} is 2-10 atoms. In some embodiments, it is 2 atoms. In some embodiments, it is 3 atoms. In some embodiments, it is 4 atoms. In some embodiments, it is 5 atoms. In some embodiments, it is 6 atoms. In some embodiments, it is 7 atoms. In some embodiments, it is 8 atoms. In some embodiments, it is 9 atoms. In some embodiments, it is 10 atoms. In some embodiments, one or more methylene units are independently replaced with —N(R′)—, —C(R′)₂—, —C(O)— or —C(O)N(R′)—. In some embodiments, a methylene unit is replace with —N(R′)—. In some embodiments, a methylene unit is replace with —C(R′)₂—. In some embodiments, a methylene unit is replace with —C(O)—. In some embodiments, a methylene unit is replace with —C(O)N(R′)—. In some embodiments, each methylene unit is independently replaced with —N(R′)—, —C(R′)₂— or —C(O)—. In some embodiments, L^{P1} is or comprises an amino acid residue. In some embodiments, L^{P1} is or comprises a peptide.

[0317] In some embodiments, L^{P1} is or comprises —[X]ₚ—X¹—, wherein each of p, X and X¹ is independently as described herein, and X¹ is bonded to L^{AA1}. In some embodiments, L^{P1} is or comprises —X¹—.

[0318] In some embodiments, L^{P1} comprises a —C(R′)₂— group, wherein one of the R′ groups is a first R′ group of the four. In some embodiments, such a —C(R′)₂— group is of an amino acid residue. In some embodiments, such a —C(R′)₂— group is of X¹. In some embodiments, such a carbon atom is an alpha carbon of an amino acid residue.

### L^{AA1}

[0319] In some embodiments, L^{AA1} is amino acid residue. In some embodiments, L^{AA1} is an amino acid residue that comprises a side chain comprising an acidic or polar group. In some embodiments, L^{AA1} is an amino acid residue that comprises a side chain comprising an acidic group.

[0320] In some embodiments, L^{AA1} is L^{AR}, wherein a methylene unit is replaced with —C(R′)(R^{AS})—, wherein each variable is independently as described herein. In some embodiments, L^{AA1} is an optionally substituted, bivalent C₁-C₆ (e.g., C₁, C₂, C₃, C₄, C₅, or C₆) aliphatic group, wherein one or more methylene units of the group are optionally and independently replaced with —C(R′)₂—, —C(R′)(R^{AS})—, -Cy-, —O—, —S—, —S—S—, —N(R′)—, —C(O)—, —C(S)—, —C(NR′)—, —C(O)N(R′)—, —N(R′)C(O)N(R′)—, —N(R′)C(O)O—, —S(O)—, —S(O)₂—, —S(O)₂N(R′)—, —C(O)S—, or —C(O)O—, wherein each variable is independently as described herein. In some embodiments, L^{AA1} is an optionally substituted, bivalent C₂-C₄ aliphatic group, wherein one or more methylene units of the group are optionally and independently replaced with —C(R′)₂—, —C(R′)(R^{AS})—, -Cy-, —O—, —S—, —S—S—, —N(R′)—, —C(O)—, —C(S)—, —C(NR′)—, —C(O)N(R′)—, —N(R′)C(O)N(R′)—, —N(R′)C(O)O—, —S(O)—, —S(O)₂—, —S(O)₂N(R′)—, —C(O)S—, or —C(O)O—, wherein each variable is independently as described herein. In some embodiments, LAA is —N(R′)—C(R′)(R^{AS})—C(O)—, wherein each variable is independently as described herein. In some embodiments, L^{AA1} is —NH—C(R′)(R^{AS})—C(O)—, wherein each variable is independently as described herein.

[0321] In some embodiments, L^{AS1} is L^{AS} as described herein. In some embodiments, R^{AA1} is —CO₂R, wherein R is as described herein. In some embodiments, R is H. In some embodiments, L^{AA1} is a residue of an acidic amino acid residue, e.g., Asp, Glu, etc. In some embodiments, L^{AA1} is X² as described herein.

### L^{P2}

[0322] In some embodiments, L^{P2} is a covalent bond, or an optionally substituted, bivalent C₂-C₆ aliphatic group, wherein one or more methylene units of the group are optionally and independently replaced with —C(R′)₂—, -Cy-, —O—, —S—, —N(R′)—, —C(O)—, —C(S)—, —C(NR′)—, —C(O)N(R′)—, —N(R′)C(O)N(R′)—, —N(R′)C(O)O—, —S(O)—, —S(O)₂—, —S(O)₂N(R′)—, —C(O)S—, or —C(O)O—. In some embodiments, the length of L^{P2} is 2-10 atoms. In some embodiments, it is 2 atoms. In some embodiments, it is 3 atoms. In some embodiments, it is 4 atoms. In some embodiments, it is 5 atoms. In some embodiments, it is 6 atoms. In some embodiments, it is 7 atoms. In some embodiments, it is 8 atoms. In some embodiments, it is 9 atoms. In some embodiments, it is 10 atoms. In some embodiments, one or more methylene units are independently replaced with —N(R′)—, —C(R′)₂—, —C(O)— or —C(O)N(R′)—. In some embodiments, a methylene unit is replace with —N(R′)—. In some embodiments, a methylene unit is replace with —C(R′)₂—. In some embodiments, a methylene unit is replace with —C(O)—. In some embodiments, a methylene unit is replace with —C(O)N(R′)—. In some embodiments, each methylene unit is independently replaced with —N(R′)—, —C(R′)₂— or —C(O)—. In some embodiments, L^{P2} is or comprises an amino acid residue. In some embodiments, L^{P2} is or comprises a peptide.

[0323] In some embodiments, L^{P2} is or comprises —[X]pX⁴[X]p′—, wherein each of p, p′, X and X⁴ is independently as described herein. In some embodiments, L^{P2} is or comprises —[X]pX³X⁴[X]p′—, wherein each X and X¹ is independently an amino acid residue, and each of p and p′ is independently 0-10. In some embodiments, L^{P2} is or comprises —X³X⁴—, wherein each X³ and X⁴ is independently as described herein, and X⁴ is bonded to L^{AA2}.

[0324] In some embodiments, L^{P2} comprises a —C(R′)₂— group, wherein one of the R′ groups is a second R′ group and the other is a third of the four. In some embodiments, such a —C(R′)₂— group is of an amino acid residue. In some embodiments, such a —C(R′)₂— group is of X⁴. In some embodiments, such a carbon atom is an alpha carbon of an amino acid residue. In some embodiments, such a carbon atom is an alpha carbon of X⁴.

### L^{AA2}

[0325] In some embodiments, L^{AA2} is amino acid residue. In some embodiments, L^{AA2} is an amino acid residue that comprises a side chain comprising an acidic or polar group. In some embodiments, L^{AA2} is an amino acid residue that comprises a side chain comprising an acidic group.

[0326] In some embodiments, L^{AA2} is L^{AR}, wherein a methylene unit is replaced with —C(R′)(R^{AS})—, wherein each variable is independently as described herein. In some embodiments, L^{A2} is an optionally substituted, bivalent C₁-C₆ (e.g., C₁, C₂, C₃, C₄, C₅, or C₆) aliphatic group, wherein one or more methylene units of the group are optionally and independently replaced with —C(R′)₂—, —C(R′)(R^{AS})—, -Cy-, —O—, —S—, —S—S—, —N(R′)—, —C(O)—, —C(S)—, —C(NR′)—, —C(O)N(R′)—, —N(R′)C(O)N(R′)—, —N(R′)C(O)O—, —S(O)—, —S(O)₂—, —S(O)₂N(R′)—, —C(O)S—, or —C(O)O—, wherein each variable is independently as described herein. In some embodiments, L^{AA2} is an optionally substituted, bivalent C₂-C₄ aliphatic group, wherein one or more methylene units of the group are optionally and independently replaced with —C(R′)₂—, —C(R′)(R^{AS})—, -Cy-, —O—, —S—, —S—S—, —N(R′)—, —C(O)—, —C(S)—, —C(NR′)—, —C(O)N(R′)—, —N(R′)C(O)N(R′)—, —N(R′)C(O)O—, —S(O)—, —S(O)₂—, —S(O)₂N(R′)—, —C(O)S—, or —C(O)O—, wherein each variable is independently as described herein. In some embodiments, L^{AA2} is —N(R′)—C(R′)(R^{AS})C(O)—, wherein each variable is independently as described herein. In some embodiments, L^{AA2} is —NH—C(R′)(R^{AS})—C(O)—, wherein each variable is independently as described herein.

[0327] In some embodiments, L^{AS2} is L^{AS} as described herein. In some embodiments, R^{AA2} is —CO₂R, wherein R is as described herein. In some embodiments, R is H. In some embodiments, L^{AA2} is a residue of an acidic amino acid residue, e.g., Asp, Glu, etc. In some embodiments, L^{AA2} is X⁵ as described herein.

### L^{P3}

[0328] In some embodiments, L^{P3} is a covalent bond. In some embodiments, L^{P3} is an optionally substituted, bivalent C₂-C₆ aliphatic group, wherein one or more methylene units of the group are optionally and independently replaced with —C(R′)₂—, -Cy-, —O—, —S—, —N(R′)—, —C(O)—, —C(S)—, —C(NR′)—, —C(O)N(R′)—, —N(R′)C(O)N(R′)—, —N(R′)C(O)O—, —S(O)—, —S(O)₂—, —S(O)₂N(R′)—, —C(O)S—, or —C(O)O—. In some embodiments, the length of L^{P3} is 2-10 atoms. In some embodiments, it is 2 atoms. In some embodiments, it is 3 atoms. In some embodiments, it is 4 atoms. In some embodiments, it is 5 atoms. In some embodiments, it is 6 atoms. In some embodiments, it is 7 atoms. In some embodiments, it is 8 atoms. In some embodiments, it is 9 atoms. In some embodiments, it is 10 atoms. In some embodiments, one or more methylene units are independently replaced with —N(R′)—, —C(R′)₂—, —C(O)— or —C(O)N(R′)—. In some embodiments, a methylene unit is replace with —N(R′)—. In some embodiments, a methylene unit is replace with —C(R′)₂—. In some embodiments, a methylene unit is replace with —C(O)—. In some embodiments, a methylene unit is replace with —C(O)N(R′)—. In some embodiments, each methylene unit is independently replaced with —N(R′)—, —C(R′)₂— or —C(O)—. In some embodiments, L^{P3} is or comprises an amino acid residue. In some embodiments, L^{P3} is or comprises a peptide.

### L^{AA3}

[0329] In some embodiments, L^{AA3} is amino acid residue. In some embodiments, L^{AA3} is an amino acid residue that comprises a side chain comprising an acidic or polar group. In some embodiments, L^{AA3} is an amino acid residue that comprises a side chain comprising an acidic group.

[0330] In some embodiments, L^{AA3} is L^{AR}, wherein a methylene unit is replaced with —C(R′)(R^{AS})—, wherein each variable is independently as described herein. In some embodiments, L^{A3} is an optionally substituted, bivalent C₁-C₆ (e.g., C₁, C₂, C₃, C₄, C₅, or C₆) aliphatic group, wherein one or more methylene units of the group are optionally and independently replaced with —C(R′)₂—, —C(R′)(R^{AS})—, -Cy-, —O—, —S—, —S—S—, —N(R′)—, —C(O)—, —C(S)—, —C(NR′)—, —C(O)N(R′)—, —N(R′)C(O)N(R′)—, —N(R′)C(O)O—, —S(O)—, —S(O)₂—, —S(O)₂N(R′)—, —C(O)S—, or —C(O)O—, wherein each variable is independently as described herein. In some embodiments, L^{AA3} is an optionally substituted, bivalent C₂-C₄ aliphatic group, wherein one or more methylene units of the group are optionally and independently replaced with —C(R′)₂—, —C(R′)(R^{AS})—, -Cy-, —O—, —S—, —S—S—, —N(R′)—, —C(O)—, —C(S)—, —C(NR′)—, —C(O)N(R′)—, —N(R′)C(O)N(R′)—, —N(R′)C(O)O—, —S(O)—, —S(O)₂—, —S(O)₂N(R′)—, —C(O)S—, or —C(O)O—, wherein each variable is independently as described herein. In some embodiments, L^{AA3} is —N(R′)—C(R′)(R^{AS})—C(O)—, wherein each variable is independently as described herein. In some embodiments, L^{AA3} is —NH—C(R′)(R^{AS})—C(O)—, wherein each variable is independently as described herein.

[0331] In some embodiments, L^{AS3} is L^{AS} as described herein. In some embodiments, R^{AA3} is —CO₂R, wherein R is as described herein. In some embodiments, R is H. In some embodiments, L^{AA3} is a residue of an acidic amino acid residue, e.g., Asp, Glu, etc. In some embodiments, L^{AA3} is X⁶ as described herein.

### L^{P4}

[0332] In some embodiments, L^{P4} is a covalent bond, or an optionally substituted, bivalent C₂-C₆ aliphatic group, wherein one or more methylene units of the group are optionally and independently replaced with —C(R′)₂—, -Cy-, —O—, —S—, —N(R′)—, —C(O)—, —C(S)—, —C(NR′)—, —C(O)N(R′)—, —N(R′)C(O)N(R′)—, —N(R′)C(O)O—, —S(O)—, —S(O)₂—, —S(O)₂N(R′)—, —C(O)S—, or —C(O)O—. In some embodiments, the length of L^{P4} is 2-10 atoms. In some embodiments, it is 2 atoms. In some embodiments, it is 3 atoms. In some embodiments, it is 4 atoms. In some embodiments, it is 5 atoms. In some embodiments, it is 6 atoms. In some embodiments, it is 7 atoms. In some embodiments, it is 8 atoms. In some embodiments, it is 9 atoms. In some embodiments, it is 10 atoms. In some embodiments, one or more methylene units are independently replaced with —N(R′)—, —C(R′)₂—, —C(O)— or —C(O)N(R′)—. In some embodiments, a methylene unit is replace with —N(R′)—. In some embodiments, a methylene unit is replace with —C(R′)₂—. In some embodiments, a methylene unit is replace with —C(O)—. In some embodiments, a methylene unit is replace with —C(O)N(R′)—. In some embodiments, each methylene unit is independently replaced with —N(R′)—, —C(R′)₂— or —C(O)—. In some embodiments, L^{P4} is or comprises an amino acid residue. In some embodiments, L^{P4} is or comprises a peptide.

[0333] In some embodiments, L^{P4} is or comprises —[X]pX⁷X⁸[X]p′—, wherein each X and X¹¹ is independently an amino acid residue, and each of p and p′ is independently 0-10. In some embodiments, L^{P4} is or comprises —X⁷X⁸—, wherein each X⁷ and X⁸ is independently as described herein, and X⁸ is bonded to L^{AA4}.

### L^{A4}4

[0334] In some embodiments, L^{AA4} is amino acid residue. In some embodiments, L^{AA4} is an amino acid residue that comprises a side chain comprising an aromatic group.

[0335] In some embodiments, L^{AA4} is L^{AR}, wherein a methylene unit is replaced with —C(R′)(R^{AS})—, wherein each variable is independently as described herein. In some embodiments, L^{AA4} is an optionally substituted, bivalent C₁-C₆ (e.g., C₁, C₂, C₃, C₄, C₅, or C₆) aliphatic group, wherein one or more methylene units of the group are optionally and independently replaced with —C(R′)₂—, —C(R′)(R^{AS})—, -Cy-, —O—, —S—, —S—S—, —N(R′)—, —C(O)—, —C(S)—, —C(NR′)—, —C(O)N(R′)—, —N(R′)C(O)N(R′)—, —N(R′)C(O)O—, —S(O)—, —S(O)₂—, —S(O)₂N(R′)—, —C(O)S—, or —C(O)O—, wherein each variable is independently as described herein. In some embodiments, L^{A4} is an optionally substituted, bivalent C₂-C₄ aliphatic group, wherein one or more methylene units of the group are optionally and independently replaced with —C(R′)₂—, —C(R′)(R^{AS})—, -Cy-, —O—, —S—, —S—S—, —N(R′)—, —C(O)—, —C(S)—, —C(NR′)—, —C(O)N(R′)—, —N(R′)C(O)N(R′)—, —N(R′)C(O)O—, —S(O)—, —S(O)₂—, —S(O)₂N(R′)—, —C(O)S—, or —C(O)O—, wherein each variable is independently as described herein. In some embodiments, L^{AA4} is —N(R′)—C(R′)(R^{AS})—C(O)—, wherein each variable is independently as described herein. In some embodiments, L^{AA4} is —NH—C(R′)(R^{AS})—C(O)—, wherein each variable is independently as described herein.

[0336] In some embodiments, L^{AS4} is L^{AS} as described herein. In some embodiments, R^{AA4} is optionally substituted C₆₋₁₄ aryl. In some embodiments, R^{AAA} is optionally substituted phenyl. In some embodiments, R^{AA4} is phenyl. In some embodiments, R^{AAA4} is optionally substituted 10-membered C₁₀ bicyclic aryl. In some embodiments, R^{AA4} is optionally substituted 5-membered monocyclic heteroaryl having 1-4 heteroatoms. In some embodiments, R^{AA4} is optionally substituted 6-membered monocyclic heteroaryl having 1-4 heteroatoms. In some embodiments, R^{AA4} is optionally substituted 9-membered bicyclic heteroaryl having 1-4 heteroatoms. In some embodiments, R^{AA4} is optionally substituted 10-membered bicyclic heteroaryl having 1-4 heteroatoms. In some embodiments, a heteroaryl has no more than one heteroatom. In some embodiments, a heteroaryl has two or more heteroatoms. In some embodiments, a heteroatom is oxygen. In some embodiments, a heteroatom is nitrogen. In some embodiments, a heteroatom is sulfur. In some embodiments, R^{AA4} is optionally substituted

[chemical structure]

In some embodiments, R^{AA4} is optionally substituted

[chemical structure]

In some embodiments, R^{AA4} is optionally substituted

[chemical structure]

In some embodiments, R^{AA4} is an aromatic amino acid residue as described herein. In some embodiments, R^{AA4} is X⁹ as described herein.

### L^{P5}

[0337] In some embodiments, L^{P5} is a covalent bond, or an optionally substituted, bivalent C₂-C₆ aliphatic group, wherein one or more methylene units of the group are optionally and independently replaced with —C(R′)₂—, -Cy-, —O—, —S—, —N(R′)—, —C(O)—, —C(S)—, —C(NR′)—, —C(O)N(R′)—, —N(R′)C(O)N(R′)—, —N(R′)C(O)O—, —S(O)—, —S(O)₂—, —S(O)₂N(R′)—, —C(O)S—, or —C(O)O—. In some embodiments, the length of L^{P5} is 2-10 atoms. In some embodiments, it is 2 atoms. In some embodiments, it is 3 atoms. In some embodiments, it is 4 atoms. In some embodiments, it is 5 atoms. In some embodiments, it is 6 atoms. In some embodiments, it is 7 atoms. In some embodiments, it is 8 atoms. In some embodiments, it is 9 atoms. In some embodiments, it is 10 atoms. In some embodiments, one or more methylene units are independently replaced with —N(R′)—, —C(R′)₂—, —C(O)— or —C(O)N(R′)—. In some embodiments, a methylene unit is replace with —N(R′)—. In some embodiments, a methylene unit is replace with —C(R′)₂—. In some embodiments, a methylene unit is replace with —C(O)—. In some embodiments, a methylene unit is replace with —C(O)N(R′)—. In some embodiments, each methylene unit is independently replaced with —N(R′)—, —C(R′)₂— or —C(O)—. In some embodiments, L^{P5} is or comprises an amino acid residue. In some embodiments, L^{P5} is or comprises a peptide.

[0338] In some embodiments, L^{P5} is or comprises —[X]pX¹¹[X]p′-, wherein each variable is independently as described herein. In some embodiments, L^{P5} is or comprises —X¹⁰X¹¹—, wherein each X¹⁰ and X¹¹ is independently as described herein, and X¹¹ is bonded to L^{AA5}.

[0339] In some embodiments, L^{P5} comprises a —C(R′)₂— group, wherein one of the R′ groups is a fourth R′ group of the four. In some embodiments, such a —C(R′)₂— group is of an amino acid residue. In some embodiments, such a —C(R′)₂— group is of X¹¹. In some embodiments, such a carbon atom is an alpha carbon of an amino acid residue. In some embodiments, such a carbon atom is an alpha carbon of X¹¹

### L^{AA5}

[0340] In some embodiments, L^{AA5} is amino acid residue. In some embodiments, L^{A5} is an amino acid residue that comprises a side chain comprising an aromatic group.

[0341] In some embodiments, L^{AA5} is L^{AR}, wherein a methylene unit is replaced with —C(R′)(R^{AS})—, wherein each variable is independently as described herein. In some embodiments, L^{A5} is an optionally substituted, bivalent C₁-C₆ (e.g., C₁, C₂, C₃, C₄, C₅, or C₆) aliphatic group, wherein one or more methylene units of the group are optionally and independently replaced with —C(R′)₂—, —C(R′)(R^{AS})—, -Cy-, —O—, —S—, —S—S—, —N(R′)—, —C(O)—, —C(S)—, —C(NR′)—, —C(O)N(R′)—, —N(R′)C(O)N(R′)—, —N(R′)C(O)O—, —S(O)—, —S(O)₂—, —S(O)₂N(R′)—, —C(O)S—, or —C(O)O—, wherein each variable is independently as described herein. In some embodiments, L^{A5} is an optionally substituted, bivalent C₂-C₄ aliphatic group, wherein one or more methylene units of the group are optionally and independently replaced with —C(R′)₂—, —C(R′)(R^{AS})—, -Cy-, —O—, —S—, —S—S—, —N(R′)—, —C(O)—, —C(S)—, —C(NR′)—, —C(O)N(R′)—, —N(R′)C(O)N(R′)—, —N(R′)C(O)O—, —S(O)—, —S(O)₂—, —S(O)₂N(R′)—, —C(O)S—, or —C(O)O—, wherein each variable is independently as described herein. In some embodiments, L^{AA5} is —N(R′)—C(R′)(R^{AS})C(O)—, wherein each variable is independently as described herein. In some embodiments, L^{AA5} is —NH—C(R′)(R^{AS})—C(O)—, wherein each variable is independently as described herein.

[0342] In some embodiments, L^{AS5} is L^{AS} as described herein. In some embodiments, R^{AA5} is optionally substituted C₆₋₁₄ aryl. In some embodiments, R^{AA5} is optionally substituted phenyl. In some embodiments, R^{AA5} is phenyl. In some embodiments, R^{AA5} is optionally substituted 10-membered C₁₀ bicyclic aryl. In some embodiments, R^{AA5} is optionally substituted 5-membered monocyclic heteroaryl having 1-4 heteroatoms. In some embodiments, R^{AA5} is optionally substituted 6-membered monocyclic heteroaryl having 1-4 heteroatoms. In some embodiments, R^{AA5} is optionally substituted 9-membered bicyclic heteroaryl having 1-4 heteroatoms. In some embodiments, R^{AA5} is optionally substituted 10-membered bicyclic heteroaryl having 1-4 heteroatoms. In some embodiments, a heteroaryl has no more than one heteroatom. In some embodiments, a heteroaryl has two or more heteroatoms. In some embodiments, a heteroatom is oxygen. In some embodiments, a heteroatom is nitrogen. In some embodiments, a heteroatom is sulfur. In some embodiments, R^{AA5} is optionally substituted

[chemical structure]

In some embodiments, R^{AA5} is optionally substituted

[chemical structure]

In some embodiments, R^{AA5} is optionally substituted

[chemical structure]

In some embodiments, R^{AA5} is an aromatic amino acid residue as described herein. In some embodiments, R^{AA5} is X¹² as described herein.

### L^{P6}

[0343] In some embodiments, L^{P6} is a covalent bond. In some embodiments, L^{P6} is an optionally substituted, bivalent C₂-C₆ aliphatic group, wherein one or more methylene units of the group are optionally and independently replaced with —C(R′)₂—, -Cy-, —O—, —S—, —N(R′)—, —C(O)—, —C(S)—, —C(NR′)—, —C(O)N(R′)—, —N(R′)C(O)N(R′)—, —N(R′)C(O)O—, —S(O)—, —S(O)₂—, —S(O)₂N(R′)—, —C(O)S—, or —C(O)O—. In some embodiments, the length of L^{P6} is 2-10 atoms. In some embodiments, it is 2 atoms. In some embodiments, it is 3 atoms. In some embodiments, it is 4 atoms. In some embodiments, it is 5 atoms. In some embodiments, it is 6 atoms. In some embodiments, it is 7 atoms. In some embodiments, it is 8 atoms. In some embodiments, it is 9 atoms. In some embodiments, it is 10 atoms. In some embodiments, one or more methylene units are independently replaced with —N(R′)—, —C(R′)₂—, —C(O)— or —C(O)N(R′)—. In some embodiments, a methylene unit is replace with —N(R′)—. In some embodiments, a methylene unit is replace with —C(R′)₂—. In some embodiments, a methylene unit is replace with —C(O)—. In some embodiments, a methylene unit is replace with —C(O)N(R′)—. In some embodiments, each methylene unit is independently replaced with —N(R′)—, —C(R′)₂— or —C(O)—. In some embodiments, L^{P6} is or comprises an amino acid residue. In some embodiments, L^{P6} is or comprises a peptide.

### L^{AA6}

[0344] In some embodiments, L^{AA6} is amino acid residue. In some embodiments, L^{AA6} is an amino acid residue that comprises a side chain comprising an aromatic group.

[0345] In some embodiments, L^{AA6} is L^{AR}, wherein a methylene unit is replaced with —C(R′)(R^{AS})—, wherein each variable is independently as described herein. In some embodiments, L^{AA6} is an optionally substituted, bivalent C₁-C₆ (e.g., C₁, C₂, C₃, C₄, C₅, or C₆) aliphatic group, wherein one or more methylene units of the group are optionally and independently replaced with —C(R′)₂—, —C(R′)(R^{AS})—, -Cy-, —O—, —S—, —S—S—, —N(R′)—, —C(O)—, —C(S)—, —C(NR′)—, —C(O)N(R′)—, —N(R′)C(O)N(R′)—, —N(R′)C(O)O—, —S(O)—, —S(O)₂—, —S(O)₂N(R′)—, —C(O)S—, or —C(O)O—, wherein each variable is independently as described herein. In some embodiments, L^{AA6} is an optionally substituted, bivalent C₂-C₄ aliphatic group, wherein one or more methylene units of the group are optionally and independently replaced with —C(R′)₂—, —C(R′)(R^{AS})—, -Cy-, —O—, —S—, —S—S—, —N(R′)—, —C(O)—, —C(S)—, —C(NR′)—, —C(O)N(R′)—, —N(R′)C(O)N(R′)—, —N(R′)C(O)O—, —S(O)—, —S(O)₂—, —S(O)₂N(R′)—, —C(O)S—, or —C(O)O—, wherein each variable is independently as described herein. In some embodiments, L^{AA6} is —N(R′)—C(R′)(R^{AS})—C(O)—, wherein each variable is independently as described herein. In some embodiments, L^{AA6} is —NH—C(R′)(R^{AS})—C(O)—, wherein each variable is independently as described herein.

[0346] In some embodiments, L^{AS6} is L^{AS} as described herein. In some embodiments, R^{AA6} is optionally substituted C₆₋₁₄ aryl. In some embodiments, R^{AA6} is optionally substituted phenyl. In some embodiments, R^{AA6} is phenyl. In some embodiments, R^{AA6} is optionally substituted 10-membered C₁₀ bicyclic aryl. In some embodiments, R^{AA6} is optionally substituted 5-membered monocyclic heteroaryl having 1-4 heteroatoms. In some embodiments, R^{AA6} is optionally substituted 6-membered monocyclic heteroaryl having 1-4 heteroatoms. In some embodiments, R^{AA6} is optionally substituted 9-membered bicyclic heteroaryl having 1-4 heteroatoms. In some embodiments, R^{AA6} is optionally substituted 10-membered bicyclic heteroaryl having 1-4 heteroatoms. In some embodiments, a heteroaryl has no more than one heteroatom. In some embodiments, a heteroaryl has two or more heteroatoms. In some embodiments, a heteroatom is oxygen. In some embodiments, a heteroatom is nitrogen. In some embodiments, a heteroatom is sulfur. In some embodiments, R^{AA6} is optionally substituted

[chemical structure]

In some embodiments, R^{AA6} is optionally substituted

[chemical structure]

In some embodiments, R^{AA6} is optionally substituted

[chemical structure]

In some embodiments, R^{AA6} is an aromatic amino acid residue as described herein. In some embodiments, R^{AA6} is X¹³ as described herein.

### L^{P7}

[0347] In some embodiments, L^{P7} is a covalent bond. In some embodiments, L^{P7} is an optionally substituted, bivalent C₁-C₂₅ (e.g., C₁₋₂₀, C₁₋₁₅, C₁₋₁₀, C₁₋₅, C₁, C₂, C₃, C₄, C₅, C₆, C₇, C₈, C₉, C₁₀, C₁₁, C₁₂, C₁₃, C₁₄, C₁₅, C₁₆, C₁₇, C18, C₁₉, or C₂₀) aliphatic or heteroaliphatic group having 1-10 heteroatoms, wherein one or more methylene units of the group are optionally and independently replaced with —C(R′)₂—, -Cy-, —O—, —S—, —S—S—, —N(R′)—, —C(O)—, —C(S)—, —C(NR′)—, —C(O)N(R′)—, —N(R′)C(O)N(R′)—, —N(R′)C(O)O—, —S(O)—, —S(O)₂—, —S(O)₂N(R′)—, —C(O)S—, or —C(O)O—. In some embodiments, L^{P7} is an optionally substituted, bivalent C₁-C₂₅ (e.g., C₁₋₂₀, C₁₋₁₅, C₁₋₁₀, C₁₋₅, C₁, C₂, C₃, C₄, C₅, C₆, C₇, C₈, C₉, C₁₀, C₁₁, C₁₂, C₁₃, C₁₄, C₁₅, C₁₆, C₁₇, C₁₈, C₁₉, or C₂₀) aliphatic group, wherein one or more methylene units of the group are optionally and independently replaced with —C(R′)₂—, -Cy-, —O—, —S—, —S—S—, —N(R′)—, —C(O)—, —C(S)—, —C(NR′)—, —C(O)N(R′)—, —N(R′)C(O)N(R′)—, —N(R′)C(O)O—, —S(O)—, —S(O)₂—, —S(O)₂N(R′)—, —C(O)S—, or —C(O)O—. In some embodiments, L^{P7} is an optionally substituted, bivalent C₁-C₂₀ aliphatic or heteroaliphatic group having 1-10 heteroatoms, wherein one or more methylene units of the group are optionally and independently replaced with —C(R′)₂—, -Cy-, —O—, —S—, —S—S—, —N(R′)—, —C(O)—, —C(S)—, —C(NR′)—, —C(O)N(R′)—, —N(R′)C(O)N(R′)—, —N(R′)C(O)O—, —S(O)—, —S(O)₂—, —S(O)₂N(R′)—, —C(O)S—, or —C(O)O—. In some embodiments, L^{P7} is an optionally substituted, bivalent C₁-C₁₅ aliphatic or heteroaliphatic group having 1-10 heteroatoms, wherein one or more methylene units of the group are optionally and independently replaced with —C(R′)₂—, -Cy-, —O—, —S—, —S—S—, —N(R′)—, —C(O)—, —C(S)—, —C(NR′)—, —C(O)N(R′)—, —N(R′)C(O)N(R′)—, —N(R′)C(O)O—, —S(O)—, —S(O)₂—, —S(O)₂N(R′)—, —C(O)S—, or —C(O)O—. In some embodiments, L^{P7} is an optionally substituted, bivalent C₁-C₁₀ aliphatic or heteroaliphatic group having 1-10 heteroatoms, wherein one or more methylene units of the group are optionally and independently replaced with —C(R′)₂—, -Cy-, —O—, —S—, —S—S—, —N(R′)—, —C(O)—, —C(S)—, —C(NR′)—, —C(O)N(R′)—, —N(R′)C(O)N(R′)—, —N(R′)C(O)O—, —S(O)—, —S(O)₂—, —S(O)₂N(R′)—, —C(O)S—, or —C(O)O—.

### L^{AS}

[0348] In some embodiments, L^{AS} is a covalent bond. In some embodiments, L^{AS} is an optionally substituted, bivalent C₁-C₁₀ (e.g., C₁₋₅, C₁, C₂, C₃, C₄, C₅, C₆, C₇, C₈, C₉, or C₁₀) aliphatic group, wherein one or more methylene units of the group optionally and independently replaced with —C(R′)₂—, -Cy-, —O—, —S—, —S—S—, —N(R′)—, —C(O)—, —C(S)—, —C(NR′)—, —C(O)N(R′)—, —N(R′)C(O)N(R′)—, —N(R′)C(O)O—, —S(O)—, —S(O)₂—, —S(O)₂N(R′)—, —C(O)S—, or —C(O)O—. In some embodiments, L^{AS} is an optionally substituted, bivalent C₁-C₁₀ aliphatic group, wherein one or more methylene units of the group optionally and independently replaced with —C(R′)₂—, -Cy-, —O—, —S—, —N(R′)—, —C(O)—, —S(O)—, or —S(O)₂—. In some embodiments, L^{AS} is an optionally substituted, bivalent C₁-C₁₀ aliphatic group, wherein one or more methylene units of the group optionally and independently replaced with —O—, —S—, or —N(R′)—. In some embodiments, L^{AS} is an optionally substituted, bivalent C₁-C₁₀ alkylene group. In some embodiments, L^{AS} is optionally substituted —CH₂—. In some embodiments, L^{AS} is —CH₂—. In some embodiments, the length of L^{AS} is 1, 2, 3, 4, 5, 6, 7, 8, 9, or 10 atoms. In some embodiments, it is 1 atom. In some embodiments, it is 2 atoms. In some embodiments, it is 3 atoms. In some embodiments, it is 4 atoms. In some embodiments, it is 5 atoms. In some embodiments, it is 6 atoms. In some embodiments, it is 7 atoms. In some embodiments, it is 8 atoms. In some embodiments, it is 9 atoms. In some embodiments, it is 10 atoms.

[0349] In some embodiments, an agent of formula I is a stapled peptide as described herein. In some embodiments, an agent of formula I is an agent selected from Table E2 or a pharmaceutically acceptable salt thereof.

[0350] Among other things, the present disclosure provides agents, e.g. peptides, that can bind to beta-catenin. In some embodiments, a peptide is a stapled peptide. In some embodiments, a peptide is a stitched peptide. In some embodiments, an agent binds to a TCF site of beta-catenin. In some embodiments, an agent competes with TCF for beta-catenin binding.

[0351] In some embodiments, the present disclosure provides an agent, which is or comprises a peptide comprising:

X¹X²X³X⁴X⁵X⁶X⁷X⁸X⁹X¹⁰X¹¹X¹²x¹³,

wherein:
[0352] each of p14, p15, p16 and p17 is independently 0 or 1;
   each of X¹, X², X³, X⁴, X⁵, X⁶, X⁷, X⁸, X⁹, X¹⁰, X¹¹, X¹², X¹³, X¹⁴, X¹⁵, X¹⁶, and X¹⁷ is independently an amino acid residue, wherein the agent binds to beta-catenin.

[0353] In some embodiments, the present disclosure provides an agent, which is or comprises a peptide comprising:

X¹X²X³X⁴X⁵X⁶X⁷X⁸X⁹X¹⁰X¹¹X¹²X¹³[X¹⁴]ₚ₁₄[X¹⁵]ₚ₁₅[X¹⁶]ₚ₁₆[X¹⁷]ₚ₁₇,

wherein:
[0354] each of p14, p15, p16 and p17 is independently 0 or 1;
[0355] each of X¹, X², X³, X⁴, X⁵, X⁶, X⁷, X⁸, X⁹, X¹⁰, X¹¹, X¹², X¹³, X¹⁴, X¹⁵, X¹⁶, and X¹⁷ is independently an amino acid residue, wherein the agent binds to beta-catenin. In some embodiments, X² comprises a side chain comprising an acidic or polar group. In some embodiments, X² comprises a side chain comprising an acidic. In some embodiments, X⁵ comprises a side chain comprising an acidic or polar group. In some embodiments, X⁵ comprises a side chain comprising an acidic. In some embodiments, X⁹ comprises a side chain comprising an optionally substituted aromatic group. In some embodiments, X¹² comprises a side chain comprising an optionally substituted aromatic group. In some embodiments, X¹³ comprises a side chain comprising an optionally substituted aromatic group. In some embodiments, X¹ and X⁴ are independently amino acid residues suitable for stapling. In some embodiments, X⁴ and X¹¹ are independently amino acid residues suitable for stapling. In some embodiments, X¹⁰ and X¹⁴ are independently amino acid residues suitable for stapling. In some embodiments, X⁷ and X¹⁴ are independently amino acid residues suitable for stapling. In some embodiments, X¹ and X⁴ are independently amino acid residues suitable for stapling, and X⁴ and X¹¹ are independently amino acid residues suitable for stapling. In some embodiments, X¹ and X⁴ are independently amino acid residues suitable for stapling, and X¹⁰ and X¹⁴ are independently amino acid residues suitable for stapling. In some embodiments, X¹ and X⁴ are independently amino acid residues suitable for stapling, and X⁷ and X¹⁴ are independently amino acid residues suitable for stapling. In some embodiments, X³ and X¹⁰ are independently amino acid residues suitable for stapling. In some embodiments, X¹ and X⁴ are stapled. In some embodiments, X⁴ and X¹¹ are stapled. In some embodiments, X¹⁰ and X¹⁴ are stapled. In some embodiments, X⁷ and X¹⁴ are stapled. In some embodiments, X³ and X¹⁰ are stapled. In some embodiments, X¹ and X⁴ are stapled, and X⁴ and X¹¹ are stapled. In some embodiments, X¹ and X⁴ are stapled, and X¹⁰ and X¹⁴ are stapled. In some embodiments, X¹ and X⁴ are stapled, and X⁷ and X¹⁴ are stapled.

[0356] In some embodiments, the present disclosure provides an agent, which is or comprises a peptide comprising:

X¹X²X³X⁴X⁵X⁶X⁷X⁸X⁹X¹⁰X¹¹X¹²X¹³[X¹⁴]ₚ₁₄[X¹⁵]ₚ₁₅[X¹⁶]ₚ₁₆[X¹⁷]ₚ₁₇,

wherein:
[0357] each of p14, p15, p16 and p17 is independently 0 or 1;
[0358] each of X¹, X², X³, X⁴, X⁵, X⁶, X⁷, X⁸, X⁹, X¹⁰, X¹¹, X¹², X¹³, X¹⁴, X¹⁵, X¹⁶, and X¹⁷ is independently an amino acid residue, wherein the agent binds to beta-catenin. In some embodiments, X² comprises a side chain comprising an acidic or polar group. In some embodiments, X² comprises a side chain comprising an acidic. In some embodiments, X⁵ comprises a side chain comprising an acidic or polar group. In some embodiments, X⁵ comprises a side chain comprising an acidic. In some embodiments, X⁹ comprises a side chain comprising an optionally substituted aromatic group. In some embodiments, X¹² comprises a side chain comprising an optionally substituted aromatic group. In some embodiments, X¹³ comprises a side chain comprising an optionally substituted aromatic group. In some embodiments, X¹ and X⁴ are independently amino acid residues suitable for stapling. In some embodiments, X⁴ and X¹¹ are independently amino acid residues suitable for stapling. In some embodiments, X¹ and X⁴ are independently amino acid residues suitable for stapling, and X⁴ and X¹¹ are independently amino acid residues suitable for stapling. In some embodiments, X³ and X¹⁰ are independently amino acid residues suitable for stapling. In some embodiments, X¹ and X⁴ are stapled. In some embodiments, X⁴ and X¹¹ are stapled. In some embodiments, X¹ and X⁴ are stapled, and X⁴ and X¹¹ are stapled. In some embodiments, X³ and X¹⁰ are stapled.

[0359] In some embodiments, the present disclosure provides an agent, which is or comprises a peptide comprising:

X¹X²X³X⁴X⁵X⁶X⁷X⁸X⁹X¹⁰X¹¹X¹²X¹³[X¹⁴]ₚ₁₄[X¹⁵]ₚ₁₅[X¹⁶]ₚ₁₆[X¹⁷]ₚ₁₇,

wherein:
[0360] each of p14, p15, p16 and p17 is independently 0 or 1;
[0361] each of X¹, X², X³, X⁴, X⁵, X⁶, X⁷, X⁸, X⁹, X¹⁰, X¹¹, X¹², X¹³, X¹⁴, X¹⁵, X¹⁶, and X¹⁷ is independently an amino acid residue, wherein:
[0362] X² comprises a side chain comprising an acidic or polar group;
[0363] X⁵ comprises a side chain comprising an acidic or polar group;
[0364] X⁹ comprises a side chain comprising an optionally substituted aromatic group;
[0365] X² comprises a side chain comprising an optionally substituted aromatic group;
[0366] X¹³ comprises a side chain comprising an optionally substituted aromatic group; and wherein:

[0367] X¹ and X⁴, and/or X⁴ and X¹¹ are independently amino acid residues suitable for stapling, or are stapled, X³ and X¹⁰ are independently amino acid residues suitable for stapling, or are stapled, X¹ and X⁴, and/or X¹⁰ and X¹⁴ are independently amino acid residues suitable for stapling, or are stapled, or X¹ and X⁴, and/or X⁷ and X¹⁴ are independently amino acid residues suitable for stapling, or are stapled.

[0368] In some embodiments, the present disclosure provides an agent, which is or comprises a peptide comprising:

X¹X²X³X⁴X⁵X⁶X⁷X⁸X⁹X¹⁰X¹¹X¹²X¹³[X¹⁴]ₚ₁₄[X¹⁵]ₚ₁₅[X¹⁶]ₚ₁₆[X¹⁷]ₚ₁₇,

wherein:
[0369] each of p14, p15, p16 and p17 is independently 0 or 1;
[0370] each of X¹, X², X³, X⁴, X⁵, X⁶, X⁷, X⁸, X⁹, X¹⁰, X¹¹, X¹², X¹³, X¹⁴, X¹⁵, X¹⁶, and X¹⁷ is independently an amino acid residue, wherein:
[0371] X² comprises a side chain comprising an acidic or polar group;
[0372] X⁵ comprises a side chain comprising an acidic or polar group;
[0373] X⁹ comprises a side chain comprising an optionally substituted aromatic group;
[0374] X² comprises a side chain comprising an optionally substituted aromatic group;
[0375] X¹³ comprises a side chain comprising an optionally substituted aromatic group; and wherein:
[0376] X¹ and X⁴, and/or X⁴ and X¹¹ are independently amino acid residues suitable for stapling, or are stapled, or X³ and X¹⁰ are independently amino acid residues suitable for stapling, or are stapled.

[0377] In some embodiments, the present disclosure provides an agent, which is or comprises a peptide comprising:

X¹X²X³X⁴X⁵X⁶X⁷X⁸X⁹X¹⁰X¹¹X¹²X¹³[X¹⁴]ₚ₁₄[X¹⁵]ₚ₁₅[X¹⁶]ₚ₁₆[X¹⁷]ₚ₁₇,

wherein:
[0378] each of p14, p15, p16 and p17 is independently 0 or 1;
[0379] each of X¹, X², X³, X⁴, X⁵, X⁶, X⁷, X⁸, X⁹, X¹⁰, X¹¹, X¹², X¹³, X¹⁴, X¹⁵, X¹⁶, and X¹⁷ is independently an amino acid residue, wherein:
[0380] X² comprises a side chain comprising an acidic or polar group;
[0381] X⁵ comprises a side chain comprising an acidic or polar group;
[0382] X⁹ comprises a side chain comprising an optionally substituted aromatic group;
[0383] X² comprises a side chain comprising an optionally substituted aromatic group;
[0384] X¹³ comprises a side chain comprising an optionally substituted aromatic group; and wherein:
[0385] X¹ and X⁴, and/or X⁴ and X¹¹ are independently amino acid residues suitable for stapling, or X³ and X¹⁰ are independently amino acid residues suitable for stapling.

[0386] In some embodiments, the present disclosure provides an agent, which is or comprises a peptide comprising:

X¹X²X³X⁴X⁵X⁶X⁷X⁸X⁹X¹⁰X¹¹X¹²X¹³[X¹⁴]ₚ₁₄[X¹⁵]ₚ₁₅[X¹⁶]ₚ₁₆[X¹⁷]ₚ₁₇,

wherein:
[0387] each of p14, p15, p16 and p17 is independently 0 or 1;
[0388] each of X¹, X², X³, X⁴, X⁵, X⁶, X⁷, X⁸, X⁹, X¹⁰, X¹¹, X¹², X¹³, X¹⁴, X¹⁵, X¹⁶, and X¹⁷ is independently an amino acid residue, wherein:
[0389] X² comprises a side chain comprising an acidic or polar group;
[0390] X⁵ comprises a side chain comprising an acidic or polar group;
[0391] X⁹ comprises a side chain comprising an optionally substituted aromatic group;
[0392] X² comprises a side chain comprising an optionally substituted aromatic group;
[0393] X¹³ comprises a side chain comprising an optionally substituted aromatic group; and wherein:
[0394] X¹ and X⁴, and X⁴ and X¹¹ are independently amino acid residues suitable for stapling, or X³ and X¹⁰ are independently amino acid residues suitable for stapling.

[0395] In some embodiments, the present disclosure provides an agent, which is or comprises a peptide comprising:

X¹X²X³X⁴X⁵X⁶X⁷X⁸X⁹X¹⁰X¹¹X¹²X¹³[X¹⁴]ₚ₁₄[X¹⁵]ₚ₁₅[X¹⁶]ₚ₁₆[X¹⁷]ₚ₁₇,

wherein:
[0396] each of p14, p15, p16 and p17 is independently 0 or 1;
[0397] each of X¹, X², X³, X⁴, X⁵, X⁶, X⁷, X⁸, X⁹, X¹⁰, X¹¹, X¹², X¹³, X¹⁴, X¹⁵, X¹⁶, and X¹⁷ is independently an amino acid residue, wherein:
[0398] X² comprises a side chain comprising an acidic or polar group;
[0399] X⁵ comprises a side chain comprising an acidic or polar group;
[0400] X⁹ comprises a side chain comprising an optionally substituted aromatic group;
[0401] X² comprises a side chain comprising an optionally substituted aromatic group;
[0402] X¹³ comprises a side chain comprising an optionally substituted aromatic group; and wherein:
[0403] X¹ and X⁴, and X⁴ and X¹¹ are independently amino acid residues suitable for stapling.

[0404] In some embodiments, the present disclosure provides an agent, which is or comprises a peptide comprising:

X¹X²X³X⁴X⁵X⁶X⁷X⁸X⁹X¹⁰X¹¹X¹²X¹³[X¹⁴]ₚ₁₄[X¹⁵]ₚ₁₅[X¹⁶]ₚ₁₆[X¹⁷]ₚ₁₇,

wherein:
[0405] each of p14, p15, p16 and p17 is independently 0 or 1;
[0406] each of X¹, X², X³, X⁴, X⁵, X⁶, X⁷, X⁸, X⁹, X¹⁰, X¹¹, X¹², X¹³, X¹⁴, X¹⁵, X¹⁶, and X¹⁷ is independently an amino acid residue, wherein:
[0407] X² comprises a side chain comprising an acidic group;
[0408] X⁵ comprises a side chain comprising an acidic group;
[0409] X⁹ comprises a side chain comprising an optionally substituted aromatic group;
[0410] X² comprises a side chain comprising an optionally substituted aromatic group;
[0411] X¹³ comprises a side chain comprising an optionally substituted aromatic group; and wherein:
[0412] X¹ and X⁴, and X⁴ and X¹¹ are independently amino acid residues suitable for stapling.

[0413] In some embodiments, the present disclosure provides an agent, which is or comprises a peptide comprising:

X¹X²X³X⁴X⁵X⁶X⁷X⁸X⁹X¹⁰X¹¹X¹²X¹³[X¹⁴]ₚ₁₄[X¹⁵]ₚ₁₅[X¹⁶]ₚ₁₆[X¹⁷]ₚ₁₇,

wherein:
[0414] each of p14, p15, p16 and p17 is independently 0 or 1;
[0415] each of X¹, X², X³, X⁴, X⁵, X⁶, X⁷, X⁸, X⁹, X¹⁰, X¹¹, X¹², X¹³, X¹⁴, X¹⁵, X¹⁶, and X¹⁷ is independently an amino acid residue, wherein:
[0416] X² comprises a side chain comprising an acidic or polar group;
[0417] X⁵ comprises a side chain comprising an acidic or polar group;
[0418] X⁹ comprises a side chain comprising an optionally substituted aromatic group;
[0419] X² comprises a side chain comprising an optionally substituted aromatic group;
[0420] X¹³ comprises a side chain comprising an optionally substituted aromatic group; and wherein:
[0421] X³ and X¹⁰ are independently amino acid residues suitable for stapling.

[0422] In some embodiments, the present disclosure provides an agent, which is or comprises a peptide comprising:

X¹X²X³X⁴X⁵X⁶X⁷X⁸X⁹X¹⁰X¹¹X¹²X¹³[X¹⁴]ₚ₁₄[X¹⁵]ₚ₁₅[X¹⁶]ₚ₁₆[X¹⁷]ₚ₁₇,

wherein:
[0423] each of p14, p15, p16 and p17 is independently 0 or 1;
[0424] each of X¹, X², X³, X⁴, X⁵, X⁶, X⁷, X⁸, X⁹, X¹⁰, X¹¹, X¹², X¹³, X¹⁴, X¹⁵, X¹⁶, and X¹⁷ is independently an amino acid residue, wherein:
[0425] X² comprises a side chain comprising an acidic group;
[0426] X⁵ comprises a side chain comprising an acidic group;
[0427] X⁹ comprises a side chain comprising an optionally substituted aromatic group;
[0428] X² comprises a side chain comprising an optionally substituted aromatic group;
[0429] X¹³ comprises a side chain comprising an optionally substituted aromatic group; and wherein:
[0430] X³ and X¹⁰ are independently amino acid residues suitable for stapling.

[0431] In some embodiments, the present disclosure provides an agent, which is or comprises a peptide comprising:

X¹X²X³X⁴X⁵X⁶X⁷X⁸X⁹X¹⁰X¹¹X¹²X¹³[X¹⁴]ₚ₁₄[X¹⁵]ₚ₁₅[X¹⁶]ₚ₁₆[X¹⁷]ₚ₁₇,

wherein:
[0432] each of p14, p15, p16 and p17 is independently 0 or 1;
[0433] each of X¹, X², X³, X⁴, X⁵, X⁶, X⁷, X⁸, X⁹, X¹⁰, X¹¹, X¹², X¹³, X¹⁴, X¹⁵, X¹⁶, and X¹⁷ is independently an amino acid residue, wherein:
[0434] X² comprises a side chain comprising an acidic or polar group;
[0435] X⁵ comprises a side chain comprising an acidic or polar group;
[0436] X⁹ comprises a side chain comprising an optionally substituted aromatic group;
[0437] X² comprises a side chain comprising an optionally substituted aromatic group;
[0438] X¹³ comprises a side chain comprising an optionally substituted aromatic group; and wherein:
[0439] X⁴ and X¹¹ are independently amino acid residues suitable for stapling.

[0440] In some embodiments, the present disclosure provides an agent, which is or comprises a peptide comprising:

X¹X²X³X⁴X⁵X⁶X⁷X⁸X⁹X¹⁰X¹¹X¹²X¹³[X¹⁴]ₚ₁₄[X¹⁵]ₚ₁₅[X¹⁶]ₚ₁₆[X¹⁷]ₚ₁₇,

wherein:
[0441] each of p14, p15, p16 and p17 is independently 0 or 1;
[0442] each of X¹, X², X³, X⁴, X⁵, X⁶, X⁷, X⁸, X⁹, X¹⁰, X¹¹, X¹², X¹³, X¹⁴, X¹⁵, X¹⁶, and X¹⁷ is independently an amino acid residue, wherein:
[0443] X² comprises a side chain comprising an acidic group;
[0444] X⁵ comprises a side chain comprising an acidic group;
[0445] X⁹ comprises a side chain comprising an optionally substituted aromatic group;
[0446] X² comprises a side chain comprising an optionally substituted aromatic group;
[0447] X¹³ comprises a side chain comprising an optionally substituted aromatic group; and wherein:
[0448] X⁴ and X¹¹ are independently amino acid residues suitable for stapling.

[0449] In some embodiments, the present disclosure provides an agent, which is or comprises a peptide comprising:

X¹X²X³X⁴X⁵X⁶X⁷X⁸X⁹X¹⁰X¹¹X¹²X¹³[X¹⁴]ₚ₁₄[X¹⁵]ₚ₁₅[X¹⁶]ₚ₁₆[X¹⁷]ₚ₁₇,

wherein:
[0450] each of p14, p15, p16 and p17 is independently 0 or 1;
[0451] each of X¹, X², X³, X⁴, X⁵, X⁶, X⁷, X⁸, X⁹, X¹⁰, X¹¹, X¹², X¹³, X¹⁴, X¹⁵, X¹⁶, and X¹⁷ is independently an amino acid residue, wherein:
[0452] X² comprises a side chain comprising an acidic or polar group;
[0453] X⁵ comprises a side chain comprising an acidic or polar group;
[0454] X⁹ comprises a side chain comprising an optionally substituted aromatic group;
[0455] X² comprises a side chain comprising an optionally substituted aromatic group;
[0456] X¹³ comprises a side chain comprising an optionally substituted aromatic group; and wherein:
[0457] X¹ and X⁴, and/or X⁴ and X¹¹ are independently stapled, or X³ and X¹⁰ are independently stapled.

[0458] In some embodiments, the present disclosure provides an agent, which is or comprises a peptide comprising:

X¹X²X³X⁴X⁵X⁶X⁷X⁸X⁹X¹⁰X¹¹X¹²X¹³[X¹⁴]ₚ₁₄[X¹⁵]ₚ₁₅[X¹⁶]ₚ₁₆[X¹⁷]ₚ₁₇,

wherein:
[0459] each of p14, p15, p16 and p17 is independently 0 or 1;
[0460] each of X¹, X², X³, X⁴, X⁵, X⁶, X⁷, X⁸, X⁹, X¹⁰, X¹¹, X¹², X¹³, X¹⁴, X¹⁵, X¹⁶, and X¹⁷ is independently an amino acid residue, wherein:
[0461] X² comprises a side chain comprising an acidic or polar group;
[0462] X⁵ comprises a side chain comprising an acidic or polar group;
[0463] X⁹ comprises a side chain comprising an optionally substituted aromatic group;
[0464] X² comprises a side chain comprising an optionally substituted aromatic group;
[0465] X¹³ comprises a side chain comprising an optionally substituted aromatic group; and wherein:
[0466] X¹ and X⁴, and X⁴ and X¹¹ are independently stapled.

[0467] In some embodiments, the present disclosure provides an agent, which is or comprises a peptide comprising:

X¹X²X³X⁴X⁵X⁶X⁷X⁸X⁹X¹⁰X¹¹X¹²X¹³[X¹⁴]ₚ₁₄[X¹⁵]ₚ₁₅[X¹⁶]ₚ₁₆[X¹⁷]ₚ₁₇,

wherein:
[0468] each of p14, p15, p16 and p17 is independently 0 or 1;
[0469] each of X¹, X², X³, X⁴, X⁵, X⁶, X⁷, X⁸, X⁹, X¹⁰, X¹¹, X¹², X¹³, X¹⁴, X¹⁵, X¹⁶, and X¹⁷ is independently an amino acid residue, wherein:
[0470] X² comprises a side chain comprising an acidic group;
[0471] X⁵ comprises a side chain comprising an acidic group;
[0472] X⁹ comprises a side chain comprising an optionally substituted aromatic group;
[0473] X² comprises a side chain comprising an optionally substituted aromatic group;
[0474] X¹³ comprises a side chain comprising an optionally substituted aromatic group; and wherein:
[0475] X¹ and X⁴, and/or X⁴ and X¹¹ are independently stapled.

[0476] In some embodiments, the present disclosure provides an agent, which is or comprises a peptide comprising:

X¹X²X³X⁴X⁵X⁶X⁷X⁸X⁹X¹⁰X¹¹X¹²X¹³[X¹⁴]ₚ₁₄[X¹⁵]ₚ₁₅[X¹⁶]ₚ₁₆[X¹⁷]ₚ₁₇,

wherein:
[0477] each of p14, p15, p16 and p17 is independently 0 or 1;
[0478] each of X¹, X², X³, X⁴, X⁵, X⁶, X⁷, X⁸, X⁹, X¹⁰, X¹¹, X¹², X¹³, X¹⁴, X¹⁵, X¹⁶, and X¹⁷ is independently an amino acid residue, wherein:
[0479] X² comprises a side chain comprising an acidic or polar group;
[0480] X⁵ comprises a side chain comprising an acidic or polar group;
[0481] X⁹ comprises a side chain comprising an optionally substituted aromatic group;
[0482] X² comprises a side chain comprising an optionally substituted aromatic group;
[0483] X¹³ comprises a side chain comprising an optionally substituted aromatic group; and wherein:
[0484] X³ and X¹⁰ are independently stapled.

[0485] In some embodiments, the present disclosure provides an agent, which is or comprises a peptide comprising:

X¹X²X³X⁴X⁵X⁶X⁷X⁸X⁹X¹⁰X¹¹X¹²X¹³[X¹⁴]ₚ₁₄[X¹⁵]ₚ₁₅[X¹⁶]ₚ₁₆[X¹⁷]ₚ₁₇,

wherein:
[0486] each of p14, p15, p16 and p17 is independently 0 or 1;
[0487] each of X¹, X², X³, X⁴, X⁵, X⁶, X⁷, X⁸, X⁹, X¹⁰, X¹¹, X¹², X¹³, X¹⁴, X¹⁵, X¹⁶, and X¹⁷ is independently an amino acid residue, wherein:
[0488] X² comprises a side chain comprising an acidic group;
[0489] X⁵ comprises a side chain comprising an acidic group;
[0490] X⁹ comprises a side chain comprising an optionally substituted aromatic group;
[0491] X² comprises a side chain comprising an optionally substituted aromatic group;
[0492] X¹³ comprises a side chain comprising an optionally substituted aromatic group; and wherein:
[0493] X³ and X¹⁰ are independently stapled.

[0494] In some embodiments, the present disclosure provides an agent, which is or comprises a peptide comprising:

X¹X²X³X⁴X⁵X⁶X⁷X⁸X⁹X¹⁰X¹¹X¹²X¹³[X¹⁴]ₚ₁₄[X¹⁵]ₚ₁₅[X¹⁶]ₚ₁₆[X¹⁷]ₚ₁₇,

wherein:
[0495] each of p14, p15, p16 and p17 is independently 0 or 1;
[0496] each of X¹, X², X³, X⁴, X⁵, X⁶, X⁷, X⁸, X⁹, X¹⁰, X¹¹, X¹², X¹³, X¹⁴, X¹⁵, X¹⁶, and X¹⁷ is independently an amino acid residue, wherein:
[0497] X² comprises a side chain comprising an acidic or polar group;
[0498] X⁵ comprises a side chain comprising an acidic or polar group;
[0499] X⁹ comprises a side chain comprising an optionally substituted aromatic group;
[0500] X² comprises a side chain comprising an optionally substituted aromatic group;
[0501] X¹³ comprises a side chain comprising an optionally substituted aromatic group; and wherein:
[0502] X⁴ and X¹¹ are independently stapled.

[0503] In some embodiments, the present disclosure provides an agent, which is or comprises a peptide comprising:

X¹X²X³X⁴X⁵X⁶X⁷X⁸X⁹X¹⁰X¹¹X¹²X¹³[X¹⁴]ₚ₁₄[X¹⁵]ₚ₁₅[X¹⁶]ₚ₁₆[X¹⁷]ₚ₁₇,

wherein:
[0504] each of p14, p15, p16 and p17 is independently 0 or 1;
[0505] each of X¹, X², X³, X⁴, X⁵, X⁶, X⁷, X⁸, X⁹, X¹⁰, X¹¹, X¹², X¹³, X¹⁴, X¹⁵, X¹⁶, and X¹⁷ is independently an amino acid residue, wherein:
[0506] X² comprises a side chain comprising an acidic group;
[0507] X⁵ comprises a side chain comprising an acidic group;
[0508] X⁹ comprises a side chain comprising an optionally substituted aromatic group;
[0509] X² comprises a side chain comprising an optionally substituted aromatic group;
[0510] X¹³ comprises a side chain comprising an optionally substituted aromatic group; and wherein:
[0511] X⁴ and X¹¹ are independently stapled.

[0512] In some embodiments, the present disclosure provides an agent, which is or comprises a peptide comprising:

X¹X²X³X⁴X⁵X⁶X⁷X⁸X⁹X¹⁰X¹¹X¹²X¹³[X¹⁴]ₚ₁₄[X¹⁵]ₚ₁₅[X¹⁶]ₚ₁₆[X¹⁷]ₚ₁₇[X¹⁸]p¹⁸[X¹⁹]ₚ₁₉[X²⁰]ₚ₂₀[X²¹]ₚ₂₁[X²²]ₚ₂₂[X²³]ₚ₂₃,

wherein:
[0513] each of p14, p15, p16, p17, p18, p19, p20, p21, p22, and p23 is independently 0 or 1;
[0514] each of X¹, X², X³, X⁴, X⁵, X⁶, X⁷, X⁸, X⁹, X¹⁰, X¹¹, X¹², X¹³, X¹⁴, X¹⁵, X¹⁶, X¹⁷, X¹⁸, X¹⁹, X²⁰, X²¹, X²², and X²³ is independently an amino acid residue, wherein the agent binds to beta-catenin. In some embodiments, X² comprises a side chain comprising an acidic or polar group. In some embodiments, X² comprises a side chain comprising an acidic. In some embodiments, X⁵ comprises a side chain comprising an acidic or polar group. In some embodiments, X⁵ comprises a side chain comprising an acidic. In some embodiments, X⁹ comprises a side chain comprising an optionally substituted aromatic group. In some embodiments, X¹² comprises a side chain comprising an optionally substituted aromatic group. In some embodiments, X¹³ comprises a side chain comprising an optionally substituted aromatic group. In some embodiments, X¹ and X⁴ are independently amino acid residues suitable for stapling. In some embodiments, X⁴ and X¹¹ are independently amino acid residues suitable for stapling. In some embodiments, X¹⁰ and X¹⁴ are independently amino acid residues suitable for stapling. In some embodiments, X⁷ and X¹⁴ are independently amino acid residues suitable for stapling. In some embodiments, X¹ and X⁴ are independently amino acid residues suitable for stapling, and X⁴ and X¹¹ are independently amino acid residues suitable for stapling. In some embodiments, X¹ and X⁴ are independently amino acid residues suitable for stapling, and X¹⁰ and X¹⁴ are independently amino acid residues suitable for stapling. In some embodiments, X¹ and X⁴ are independently amino acid residues suitable for stapling, and X⁷ and X¹⁴ are independently amino acid residues suitable for stapling. In some embodiments, X³ and X¹⁰ are independently amino acid residues suitable for stapling. In some embodiments, X¹ and X⁴ are stapled. In some embodiments, X⁴ and X¹¹ are stapled. In some embodiments, X¹⁰ and X¹⁴ are stapled. In some embodiments, X⁷ and X¹⁴ are stapled. In some embodiments, X³ and X¹⁰ are stapled. In some embodiments, X¹ and X⁴ are stapled, and X⁴ and X¹¹ are stapled. In some embodiments, X¹ and X⁴ are stapled, and X¹⁰ and X¹⁴ are stapled. In some embodiments, X¹ and X⁴ are stapled, and X⁷ and X¹⁴ are stapled.

[0515] In some embodiments, the present disclosure provides an agent, which is or comprises a peptide comprising:

X¹X²X³X⁴X⁵X⁶X⁷X⁸X⁹X¹⁰X¹¹X¹²X¹³[X¹⁴]ₚ₁₄[X¹⁵]ₚ₁₅[X¹⁶]ₚ₁₆[X¹⁷]ₚ₁₇[X¹⁸]p¹⁸[X¹⁹]ₚ₁₉[X²⁰]ₚ₂₀[X²¹]ₚ₂₁[X²²]ₚ₂₂[X²³]ₚ₂₃,

wherein:
[0516] each of p14, p15, p16, p17, p18, p19, p20, p21, p22, and p23 is independently 0 or 1;
[0517] each of X¹, X², X³, X⁴, X⁵, X⁶, X⁷, X⁸, X⁹, X¹⁰, X¹¹, X¹², X¹³, X¹⁴, X¹⁵, X¹⁶, X¹⁷, X¹⁸, X¹⁹, X²⁰, X²¹, X²², and X²³ is independently an amino acid residue, wherein the agent binds to beta-catenin. In some embodiments, X² comprises a side chain comprising an acidic or polar group. In some embodiments, X² comprises a side chain comprising an acidic. In some embodiments, X⁵ comprises a side chain comprising an acidic or polar group. In some embodiments, X⁵ comprises a side chain comprising an acidic. In some embodiments, X⁹ comprises a side chain comprising an optionally substituted aromatic group. In some embodiments, X¹² comprises a side chain comprising an optionally substituted aromatic group. In some embodiments, X¹³ comprises a side chain comprising an optionally substituted aromatic group. In some embodiments, X¹ and X⁴ are independently amino acid residues suitable for stapling. In some embodiments, X⁴ and X¹¹ are independently amino acid residues suitable for stapling. In some embodiments, X¹ and X⁴ are independently amino acid residues suitable for stapling, and X⁴ and X¹¹ are independently amino acid residues suitable for stapling. In some embodiments, X³ and X¹⁰ are independently amino acid residues suitable for stapling. In some embodiments, X¹ and X⁴ are stapled. In some embodiments, X⁴ and X¹¹ are stapled. In some embodiments, X¹ and X⁴ are stapled, and X⁴ and X¹¹ are stapled. In some embodiments, X³ and X¹⁰ are stapled.

X¹X²X³X⁴X⁵X⁶X⁷X⁸X⁹X¹⁰X¹¹X¹²X¹³[X¹⁴]ₚ₁₄[X¹⁵]ₚ₁₅[X¹⁶]ₚ₁₆[X¹⁷]ₚ₁₇[X¹⁸]p¹⁸[X¹⁹]ₚ₁₉[X²⁰]ₚ₂₀[X²¹]ₚ₂₁[X²²]ₚ₂₂[X²³]ₚ₂₃,

wherein:
[0518] each of p14, p15, p16, p17, p18, p19, p20, p21, p22, and p23 is independently 0 or 1;
[0519] each of X¹, X², X³, X⁴, X⁵, X⁶, X⁷, X⁸, X⁹, X¹⁰, X¹¹, X¹², X¹³, X¹⁴, X¹⁵, X¹⁶, X¹⁷, X¹⁸, X¹⁹, X²⁰, X²¹,
[0520] X²², and X²³ is independently an amino acid residue, wherein:
[0521] X² comprises a side chain comprising an acidic or polar group;
[0522] X⁵ comprises a side chain comprising an acidic or polar group;
[0523] X⁹ comprises a side chain comprising an optionally substituted aromatic group;
[0524] X² comprises a side chain comprising an optionally substituted aromatic group;
[0525] X¹³ comprises a side chain comprising an optionally substituted aromatic group; and wherein:
[0526] X¹ and X⁴, and/or X⁴ and X¹¹ are independently amino acid residues suitable for stapling, or are stapled, X³ and X¹⁰ are independently amino acid residues suitable for stapling, or are stapled, X¹ and X⁴, and/or X¹⁰ and X¹⁴ are independently amino acid residues suitable for stapling, or are stapled, or X¹ and X⁴, and/or X⁷ and X¹⁴ are independently amino acid residues suitable for stapling, or are stapled.

[0527] In some embodiments, the present disclosure provides an agent, which is or comprises a peptide comprising:

X¹X²X³X⁴X⁵X⁶X⁷X⁸X⁹X¹⁰X¹¹X¹²X¹³[X¹⁴]ₚ₁₄[X¹⁵]ₚ₁₅[X¹⁶]ₚ₁₆[X¹⁷]ₚ₁₇[X¹⁸]p¹⁸[X¹⁹]ₚ₁₉[X²⁰]ₚ₂₀[X²¹]ₚ₂₁[X²²]ₚ₂₂[X²³]ₚ₂₃,

wherein:
[0528] each of p14, p15, p16, p17, p18, p19, p20, p21, p22, and p23 is independently 0 or 1;
[0529] each of X¹, X², X³, X⁴, X⁵, X⁶, X⁷, X⁸, X⁹, X¹⁰, X¹¹, X¹², X¹³, X¹⁴, X¹⁵, X¹⁶, X¹⁷, X¹⁸, X¹⁹, X²⁰, X²¹, X²², and X²³ is independently an amino acid residue, wherein:
[0530] X² comprises a side chain comprising an acidic or polar group;
[0531] X⁵ comprises a side chain comprising an acidic or polar group;
[0532] X⁹ comprises a side chain comprising an optionally substituted aromatic group;
[0533] X² comprises a side chain comprising an optionally substituted aromatic group;
[0534] X¹³ comprises a side chain comprising an optionally substituted aromatic group; and wherein:
[0535] X¹ and X⁴, and/or X⁴ and X¹¹ are independently amino acid residues suitable for stapling, or are stapled, or X³ and X¹⁰ are independently amino acid residues suitable for stapling, or are stapled.

[0536] In some embodiments, the present disclosure provides an agent, which is or comprises a peptide comprising:

X¹X²X³X⁴X⁵X⁶X⁷X⁸X⁹X¹⁰X¹¹X¹²X¹³[X¹⁴]ₚ₁₄[X¹⁵]ₚ₁₅[X¹⁶]ₚ₁₆[X¹⁷]ₚ₁₇[X¹⁸]p¹⁸[X¹⁹]ₚ₁₉[X²⁰]ₚ₂₀[X²¹]ₚ₂₁[X²²]ₚ₂₂[X²³]ₚ₂₃,

wherein:
[0537] each of p14, p15, p16, p17, p18, p19, p20, p21, p22, and p23 is independently 0 or 1;
[0538] each of X¹, X², X³, X⁴, X⁵, X⁶, X⁷, X⁸, X⁹, X¹⁰, X¹¹, X¹², X¹³, X¹⁴, X¹⁵, X¹⁶, X¹⁷, X¹⁸, X¹⁹, X²⁰, X²¹, X²², and X²³ is independently an amino acid residue, wherein:
[0539] X² comprises a side chain comprising an acidic or polar group;
[0540] X⁵ comprises a side chain comprising an acidic or polar group;
[0541] X⁹ comprises a side chain comprising an optionally substituted aromatic group;
[0542] X² comprises a side chain comprising an optionally substituted aromatic group;
[0543] X¹³ comprises a side chain comprising an optionally substituted aromatic group; and wherein:
[0544] X¹ and X⁴, and/or X⁴ and X¹¹ are independently amino acid residues suitable for stapling, or X³ and X¹⁰ are independently amino acid residues suitable for stapling.

[0545] In some embodiments, the present disclosure provides an agent, which is or comprises a peptide comprising:

X¹X²X³X⁴X⁵X⁶X⁷X⁸X⁹X¹⁰X¹¹X¹²X¹³[X¹⁴]ₚ₁₄[X¹⁵]ₚ₁₅[X¹⁶]ₚ₁₆[X¹⁷]ₚ₁₇[X¹⁸]p¹⁸[X¹⁹]ₚ₁₉[X²⁰]ₚ₂₀[X²¹]ₚ₂₁[X²²]ₚ₂₂[X²³]ₚ₂₃,

wherein:
[0546] each of p14, p15, p16, p17, p18, p19, p20, p21, p22, and p23 is independently 0 or 1;
[0547] each of X¹, X², X³, X⁴, X⁵, X⁶, X⁷, X⁸, X⁹, X¹⁰, X¹¹, X¹², X¹³, X¹⁴, X¹⁵, X¹⁶, X¹⁷, X¹⁸, X¹⁹, X²⁰, X²¹, X²², and X²³ is independently an amino acid residue, wherein:
[0548] X² comprises a side chain comprising an acidic or polar group;
[0549] X⁵ comprises a side chain comprising an acidic or polar group;
[0550] X⁹ comprises a side chain comprising an optionally substituted aromatic group;
[0551] X² comprises a side chain comprising an optionally substituted aromatic group;
[0552] X¹³ comprises a side chain comprising an optionally substituted aromatic group; and wherein:
[0553] X¹ and X⁴, and X⁴ and X¹¹ are independently amino acid residues suitable for stapling, or X³ and X¹⁰ are independently amino acid residues suitable for stapling.

[0554] In some embodiments, the present disclosure provides an agent, which is or comprises a peptide comprising:

X¹X²X³X⁴X⁵X⁶X⁷X⁸X⁹X¹⁰X¹¹X¹²X¹³[X¹⁴]ₚ₁₄[X¹⁵]ₚ₁₅[X¹⁶]ₚ₁₆[X¹⁷]ₚ₁₇[X¹⁸]p¹⁸[X¹⁹]ₚ₁₉[X²⁰]ₚ₂₀[X²¹]ₚ₂₁[X²²]ₚ₂₂[X²³]ₚ₂₃,

wherein:
[0555] each of p14, p15, p16, p17, p18, p19, p20, p21, p22, and p23 is independently 0 or 1;
[0556] each of X¹, X², X³, X⁴, X⁵, X⁶, X⁷, X⁸, X⁹, X¹⁰, X¹¹, X¹², X¹³, X¹⁴, X¹⁵, X¹⁶, X¹⁷, X¹⁸, X¹⁹, X²⁰, X²¹, X²², and X²³ is independently an amino acid residue, wherein:
[0557] X² comprises a side chain comprising an acidic or polar group;
[0558] X⁵ comprises a side chain comprising an acidic or polar group;
[0559] X⁹ comprises a side chain comprising an optionally substituted aromatic group;
[0560] X² comprises a side chain comprising an optionally substituted aromatic group;
[0561] X¹³ comprises a side chain comprising an optionally substituted aromatic group; and wherein:
[0562] X¹ and X⁴, and X⁴ and X¹¹ are independently amino acid residues suitable for stapling.

[0563] In some embodiments, the present disclosure provides an agent, which is or comprises a peptide comprising:

X¹X²X³X⁴X⁵X⁶X⁷X⁸X⁹X¹⁰X¹¹X¹²X¹³[X¹⁴]ₚ₁₄[X¹⁵]ₚ₁₅[X¹⁶]ₚ₁₆[X¹⁷]ₚ₁₇[X¹⁸]p¹⁸[X¹⁹]ₚ₁₉[X²⁰]ₚ₂₀[X²¹]ₚ₂₁[X²²]ₚ₂₂[X²³]ₚ₂₃,

wherein:
[0564] each of p14, p15, p16, p17, p18, p19, p20, p21, p22, and p23 is independently 0 or 1;
[0565] each of X¹, X², X³, X⁴, X⁵, X⁶, X⁷, X⁸, X⁹, X¹⁰, X¹¹, X¹², X¹³, X¹⁴, X¹⁵, X¹⁶, X¹⁷, X¹⁸, X¹⁹, X²⁰, X²¹, X²², and X²³ is independently an amino acid residue, wherein:
[0566] X² comprises a side chain comprising an acidic group;
[0567] X⁵ comprises a side chain comprising an acidic group;
[0568] X⁹ comprises a side chain comprising an optionally substituted aromatic group;
[0569] X² comprises a side chain comprising an optionally substituted aromatic group;
[0570] X¹³ comprises a side chain comprising an optionally substituted aromatic group; and wherein:
[0571] X¹ and X⁴, and X⁴ and X¹¹ are independently amino acid residues suitable for stapling.

[0572] In some embodiments, the present disclosure provides an agent, which is or comprises a peptide comprising:

X¹X²X³X⁴X⁵X⁶X⁷X⁸X⁹X¹⁰X¹¹X¹²X¹³[X¹⁴]ₚ₁₄[X¹⁵]ₚ₁₅[X¹⁶]ₚ₁₆[X¹⁷]ₚ₁₇[X¹⁸]p¹⁸[X¹⁹]ₚ₁₉[X²⁰]ₚ₂₀[X²¹]ₚ₂₁[X²²]ₚ₂₂[X²³]ₚ₂₃,

wherein:
[0573] each of p14, p15, p16, p17, p18, p19, p20, p21, p22, and p23 is independently 0 or 1;
[0574] each of X¹, X², X³, X⁴, X⁵, X⁶, X⁷, X⁸, X⁹, X¹⁰, X¹¹, X¹², X¹³, X¹⁴, X¹⁵, X¹⁶, X¹⁷, X¹⁸, X¹⁹, X²⁰, X²¹, X²², and X²³ is independently an amino acid residue, wherein:
[0575] X² comprises a side chain comprising an acidic or polar group;
[0576] X⁵ comprises a side chain comprising an acidic or polar group;
[0577] X⁹ comprises a side chain comprising an optionally substituted aromatic group;
[0578] X² comprises a side chain comprising an optionally substituted aromatic group;
[0579] X¹³ comprises a side chain comprising an optionally substituted aromatic group; and wherein:
[0580] X³ and X¹⁰ are independently amino acid residues suitable for stapling.

[0581] In some embodiments, the present disclosure provides an agent, which is or comprises a peptide comprising:

X¹X²X³X⁴X⁵X⁶X⁷X⁸X⁹X¹⁰X¹¹X¹²X¹³[X¹⁴]ₚ₁₄[X¹⁵]ₚ₁₅[X¹⁶]ₚ₁₆[X¹⁷]ₚ₁₇[X¹⁸]p¹⁸[X¹⁹]ₚ₁₉[X²⁰]ₚ₂₀[X²¹]ₚ₂₁[X²²]ₚ₂₂[X²³]ₚ₂₃,

wherein:
[0582] each of p14, p15, p16, p17, p18, p19, p20, p21, p22, and p23 is independently 0 or 1;
[0583] each of X¹, X², X³, X⁴, X⁵, X⁶, X⁷, X⁸, X⁹, X¹⁰, X¹¹, X¹², X¹³, X¹⁴, X¹⁵, X¹⁶, X¹⁷, X¹⁸, X¹⁹, X²⁰, X²¹, X²², and X²³ is independently an amino acid residue, wherein:
[0584] X² comprises a side chain comprising an acidic group;
[0585] X⁵ comprises a side chain comprising an acidic group;
[0586] X⁹ comprises a side chain comprising an optionally substituted aromatic group;
[0587] X² comprises a side chain comprising an optionally substituted aromatic group;
[0588] X¹³ comprises a side chain comprising an optionally substituted aromatic group; and wherein:
[0589] X³ and X¹⁰ are independently amino acid residues suitable for stapling.

[0590] In some embodiments, the present disclosure provides an agent, which is or comprises a peptide comprising:

X¹X²X³X⁴X⁵X⁶X⁷X⁸X⁹X¹⁰X¹¹X¹²X¹³[X¹⁴]ₚ₁₄[X¹⁵]ₚ₁₅[X¹⁶]ₚ₁₆[X¹⁷]ₚ₁₇[X¹⁸]p¹⁸[X¹⁹]ₚ₁₉[X²⁰]ₚ₂₀[X²¹]ₚ₂₁[X²²]ₚ₂₂[X²³]ₚ₂₃,

wherein:
[0591] each of p14, p15, p16, p17, p18, p19, p20, p21, p22, and p23 is independently 0 or 1;
[0592] each of X¹, X², X³, X⁴, X⁵, X⁶, X⁷, X⁸, X⁹, X¹⁰, X¹¹, X¹², X¹³, X¹⁴, X¹⁵, X¹⁶, X¹⁷, X¹⁸, X¹⁹, X²⁰, X²¹, X²², and X²³ is independently an amino acid residue, wherein:
[0593] X² comprises a side chain comprising an acidic or polar group;
[0594] X⁵ comprises a side chain comprising an acidic or polar group;
[0595] X⁹ comprises a side chain comprising an optionally substituted aromatic group;
[0596] X² comprises a side chain comprising an optionally substituted aromatic group;
[0597] X¹³ comprises a side chain comprising an optionally substituted aromatic group; and wherein:
[0598] X⁴ and X¹¹ are independently amino acid residues suitable for stapling.

[0599] In some embodiments, the present disclosure provides an agent, which is or comprises a peptide comprising:

X¹X²X³X⁴X⁵X⁶X⁷X⁸X⁹X¹⁰X¹¹X¹²X¹³[X¹⁴]ₚ₁₄[X¹⁵]ₚ₁₅[X¹⁶]ₚ₁₆[X¹⁷]ₚ₁₇[X¹⁸]p¹⁸[X¹⁹]ₚ₁₉[X²⁰]ₚ₂₀[X²¹]ₚ₂₁[X²²]ₚ₂₂[X²³]ₚ₂₃,

wherein:
[0600] each of p14, p15, p16, p17, p18, p19, p20, p21, p22, and p23 is independently 0 or 1;
[0601] each of X¹, X², X³, X⁴, X⁵, X⁶, X⁷, X⁸, X⁹, X¹⁰, X¹¹, X¹², X¹³, X¹⁴, X¹⁵, X¹⁶, X¹⁷, X¹⁸, X¹⁹, X²⁰, X²¹, X²², and X²³ is independently an amino acid residue, wherein:
[0602] X² comprises a side chain comprising an acidic group;
[0603] X⁵ comprises a side chain comprising an acidic group;
[0604] X⁹ comprises a side chain comprising an optionally substituted aromatic group;
[0605] X² comprises a side chain comprising an optionally substituted aromatic group;
[0606] X¹³ comprises a side chain comprising an optionally substituted aromatic group; and wherein:
[0607] X⁴ and X¹¹ are independently amino acid residues suitable for stapling.

[0608] In some embodiments, the present disclosure provides an agent, which is or comprises a peptide comprising:

X¹X²X³X⁴X⁵X⁶X⁷X⁸X⁹X¹⁰X¹¹X¹²X¹³[X¹⁴]ₚ₁₄[X¹⁵]ₚ₁₅[X¹⁶]ₚ₁₆[X¹⁷]ₚ₁₇[X¹⁸]p¹⁸[X¹⁹]ₚ₁₉[X²⁰]ₚ₂₀[X²¹]ₚ₂₁[X²²]ₚ₂₂[X²³]ₚ₂₃,

wherein:
[0609] each of p14, p15, p16, p17, p18, p19, p20, p21, p22, and p23 is independently 0 or 1;
[0610] each of X¹, X², X³, X⁴, X⁵, X⁶, X⁷, X⁸, X⁹, X¹⁰, X¹¹, X¹², X¹³, X¹⁴, X¹⁵, X¹⁶, X¹⁷, X¹⁸, X¹⁹, X²⁰, X²¹, X²², and X²³ is independently an amino acid residue, wherein:
[0611] X² comprises a side chain comprising an acidic or polar group;
[0612] X⁵ comprises a side chain comprising an acidic or polar group;
[0613] X⁹ comprises a side chain comprising an optionally substituted aromatic group;
[0614] X² comprises a side chain comprising an optionally substituted aromatic group;
[0615] X¹³ comprises a side chain comprising an optionally substituted aromatic group; and wherein:
[0616] X¹ and X⁴, and/or X⁴ and X¹¹ are independently stapled, or X³ and X¹⁰ are independently stapled.

[0617] In some embodiments, the present disclosure provides an agent, which is or comprises a peptide comprising:

X¹X²X³X⁴X⁵X⁶X⁷X⁸X⁹X¹⁰X¹¹X¹²X¹³[X¹⁴]ₚ₁₄[X¹⁵]ₚ₁₅[X¹⁶]ₚ₁₆[X¹⁷]ₚ₁₇[X¹⁸]p¹⁸[X¹⁹]ₚ₁₉[X²⁰]ₚ₂₀[X²¹]ₚ₂₁[X²²]ₚ₂₂[X²³]ₚ₂₃,

wherein:
[0618] each of p14, p15, p16, p17, p18, p19, p20, p21, p22, and p23 is independently 0 or 1;
[0619] each of X¹, X², X³, X⁴, X⁵, X⁶, X⁷, X⁸, X⁹, X¹⁰, X¹¹, X¹², X¹³, X¹⁴, X¹⁵, X¹⁶, X¹⁷, X¹⁸, X¹⁹, X²⁰, X²¹, X²², and X²³ is independently an amino acid residue, wherein:
[0620] X² comprises a side chain comprising an acidic or polar group;
[0621] X⁵ comprises a side chain comprising an acidic or polar group;
[0622] X⁹ comprises a side chain comprising an optionally substituted aromatic group;
[0623] X² comprises a side chain comprising an optionally substituted aromatic group;
[0624] X¹³ comprises a side chain comprising an optionally substituted aromatic group; and wherein:
[0625] X¹ and X⁴, and X⁴ and X¹¹ are independently stapled.

[0626] In some embodiments, the present disclosure provides an agent, which is or comprises a peptide comprising:

X¹X²X³X⁴X⁵X⁶X⁷X⁸X⁹X¹⁰X¹¹X¹²X¹³[X¹⁴]ₚ₁₄[X¹⁵]ₚ₁₅[X¹⁶]ₚ₁₆[X¹⁷]ₚ₁₇[X¹⁸]p¹⁸[X¹⁹]ₚ₁₉[X²⁰]ₚ₂₀[X²¹]ₚ₂₁[X²²]ₚ₂₂[X²³]ₚ₂₃,

wherein:
[0627] each of p14, p15, p16, p17, p18, p19, p20, p21, p22, and p23 is independently 0 or 1;
[0628] each of X¹, X², X³, X⁴, X⁵, X⁶, X⁷, X⁸, X⁹, X¹⁰, X¹¹, X¹², X¹³, X¹⁴, X¹⁵, X¹⁶, X¹⁷, X¹⁸, X¹⁹, X²⁰, X²¹, X²², and X²³ is independently an amino acid residue, wherein:
[0629] X² comprises a side chain comprising an acidic group;
[0630] X⁵ comprises a side chain comprising an acidic group;
[0631] X⁹ comprises a side chain comprising an optionally substituted aromatic group;
[0632] X² comprises a side chain comprising an optionally substituted aromatic group;
[0633] X¹³ comprises a side chain comprising an optionally substituted aromatic group; and wherein:
[0634] X¹ and X⁴, and/or X⁴ and X¹¹ are independently stapled.

[0635] In some embodiments, the present disclosure provides an agent, which is or comprises a peptide comprising:

X¹X²X³X⁴X⁵X⁶X⁷X⁸X⁹X¹⁰X¹¹X¹²X¹³[X¹⁴]ₚ₁₄[X¹⁵]ₚ₁₅[X¹⁶]ₚ₁₆[X¹⁷]ₚ₁₇[X¹⁸]p¹⁸[X¹⁹]ₚ₁₉[X²⁰]ₚ₂₀[X²¹]ₚ₂₁[X²²]ₚ₂₂[X²³]ₚ₂₃,

wherein:
[0636] each of p14, p15, p16, p17, p18, p19, p20, p21, p22, and p23 is independently 0 or 1;
[0637] each of X¹, X², X³, X⁴, X⁵, X⁶, X⁷, X⁸, X⁹, X¹⁰, X¹¹, X¹², X¹³, X¹⁴, X¹⁵, X¹⁶, X¹⁷, X¹⁸, X¹⁹, X²⁰, X²¹, X²², and X²³ is independently an amino acid residue, wherein:
[0638] X² comprises a side chain comprising an acidic or polar group;
[0639] X⁵ comprises a side chain comprising an acidic or polar group;
[0640] X⁹ comprises a side chain comprising an optionally substituted aromatic group;
[0641] X² comprises a side chain comprising an optionally substituted aromatic group;
[0642] X¹³ comprises a side chain comprising an optionally substituted aromatic group; and wherein:
[0643] X³ and X¹⁰ are independently stapled.

[0644] In some embodiments, the present disclosure provides an agent, which is or comprises a peptide comprising:

X¹X²X³X⁴X⁵X⁶X⁷X⁸X⁹X¹⁰X¹¹X¹²X¹³[X¹⁴]ₚ₁₄[X¹⁵]ₚ₁₅[X¹⁶]ₚ₁₆[X¹⁷]ₚ₁₇[X¹⁸]p¹⁸[X¹⁹]ₚ₁₉[X²⁰]ₚ₂₀[X²¹]ₚ₂₁[X²²]ₚ₂₂[X²³]ₚ₂₃,

wherein:
[0645] each of p14, p15, p16, p17, p18, p19, p20, p21, p22, and p23 is independently 0 or 1;
[0646] each of X¹, X², X³, X⁴, X⁵, X⁶, X⁷, X⁸, X⁹, X¹⁰, X¹¹, X¹², X¹³, X¹⁴, X¹⁵, X¹⁶, X¹⁷, X¹⁸, X¹⁹, X²⁰, X²¹, X²², and X²³ is independently an amino acid residue, wherein:
[0647] X² comprises a side chain comprising an acidic group;
[0648] X⁵ comprises a side chain comprising an acidic group;
[0649] X⁹ comprises a side chain comprising an optionally substituted aromatic group;
[0650] X² comprises a side chain comprising an optionally substituted aromatic group;
[0651] X¹³ comprises a side chain comprising an optionally substituted aromatic group; and wherein:
[0652] X³ and X¹⁰ are independently stapled.

[0653] In some embodiments, the present disclosure provides an agent, which is or comprises a peptide comprising:

X¹X²X³X⁴X⁵X⁶X⁷X⁸X⁹X¹⁰X¹¹X¹²X¹³[X¹⁴]ₚ₁₄[X¹⁵]ₚ₁₅[X¹⁶]ₚ₁₆[X¹⁷]ₚ₁₇[X¹⁸]p¹⁸[X¹⁹]ₚ₁₉[X²⁰]ₚ₂₀[X²¹]ₚ₂₁[X²²]ₚ₂₂[X²³]ₚ₂₃,

wherein:
[0654] each of p14, p15, p16, p17, p18, p19, p20, p21, p22, and p23 is independently 0 or 1;
[0655] each of X¹, X², X³, X⁴, X⁵, X⁶, X⁷, X⁸, X⁹, X¹⁰, X¹¹, X¹², X¹³, X¹⁴, X¹⁵, X¹⁶, X¹⁷, X¹⁸, X¹⁹, X²⁰, X²¹, X²², and X²³ is independently an amino acid residue, wherein:
[0656] X² comprises a side chain comprising an acidic or polar group;
[0657] X⁵ comprises a side chain comprising an acidic or polar group;
[0658] X⁹ comprises a side chain comprising an optionally substituted aromatic group;
[0659] X² comprises a side chain comprising an optionally substituted aromatic group;
[0660] X¹³ comprises a side chain comprising an optionally substituted aromatic group; and wherein:
[0661] X⁴ and X¹¹ are independently stapled.

[0662] In some embodiments, the present disclosure provides an agent, which is or comprises a peptide comprising:

X¹X²X³X⁴X⁵X⁶X⁷X⁸X⁹X¹⁰X¹¹X¹²X¹³[X¹⁴]ₚ₁₄[X¹⁵]ₚ₁₅[X¹⁶]ₚ₁₆[X¹⁷]ₚ₁₇[X¹⁸]p¹⁸[X¹⁹]ₚ₁₉[X²⁰]ₚ₂₀[X²¹]ₚ₂₁[X²²]ₚ₂₂[X²³]ₚ₂₃,

wherein:
[0663] each of p14, p15, p16, p17, p18, p19, p20, p21, p22, and p23 is independently 0 or 1;
[0664] each of X¹, X², X³, X⁴, X⁵, X⁶, X⁷, X⁸, X⁹, X¹⁰, X¹¹, X¹², X¹³, X¹⁴, X¹⁵, X¹⁶, X¹⁷, X¹⁸, X¹⁹, X²⁰, X²¹, X²², and X²³ is independently an amino acid residue, wherein:
[0665] X² comprises a side chain comprising an acidic group;
[0666] X⁵ comprises a side chain comprising an acidic group;
[0667] X⁹ comprises a side chain comprising an optionally substituted aromatic group;
[0668] X² comprises a side chain comprising an optionally substituted aromatic group;
[0669] X¹³ comprises a side chain comprising an optionally substituted aromatic group; and wherein:
[0670] X⁴ and X¹¹ are independently stapled.

[0671] Various types of amino acid residues can be used for X¹, e.g., a residue of an amino acid of formula A-I, A-II, A-III, A-IV, A-V, A-VI, etc. or a salt thereof in accordance with the present disclosure. In some embodiments, X¹ is —N(R^{a1})-L^{a1}-C(R^{a2})(R^{a3})-L^{a2}-C(O)—, wherein each variable is independently as described herein. In some embodiments, X¹ is —N(R^{a1})—C(R^{a2})(R^{a3})—C(O)—, wherein each variable is independently as described herein. In some embodiments, X¹ is —N(R^{a1})—C(R^{a2})H—C(O)—, wherein each variable is independently as described herein. In some embodiments, R^{a1} is —H. In some embodiments, R^{a3} is —H.

[0672] As shown herein (e.g., for various amino acids and residues thereof), in various embodiments, L^{a} is L as described herein. For example, in some embodiments, L is an optionally substituted bivalent linear or branched C₁₋₁₀ hydrocarbon chain. In some embodiments, L is an optionally substituted bivalent linear C₁₋₁₀ hydrocarbon chain. In some embodiments, L is —(CH₂)ₙ—, wherein n is 1-10. In some embodiments, L is —CH₂—. In some embodiments, L is —(CH₂)₂—. In some embodiments, L is —(CH₂)₃—. In some embodiments, L is —(CH₂)₄—. In some embodiments, one or more methylene units of L are independently replaced with —C(O)—, —N(R′)—, -Cy- or —O—. In some embodiments, a methylene unit is replaced with —C(O)—. In some embodiments, a methylene unit is replaced with —N(R′)—. In some embodiments, a methylene unit is replaced with -Cy-. In some embodiments, -Cy- is optionally substituted phenylene. In some embodiments, -Cy- is 1,2-phenylene. In some embodiments, a methylene unit is replaced with —O—. In some embodiments, L is —C(O)—(CH₂)ₙ—. In some embodiments, L is —C(O)—(CH₂)₂—. In some embodiments, L is —C(O)—(CH₂)₃—. In some embodiments, L is —C(O)—1,2-phenylene-O—CH₂—. As appreciated by those skilled in the art, embodiments described for each group or moiety, e.g., L, is applicable to all groups that can be such a group or moiety (e.g., La, L^{s1}, L^{s2}, L^{s3}, etc.), no matter where such embodiments are described.

[0673] In some embodiments, X¹ a residue of amino acid that comprises an optionally substituted ring. In some embodiments, the amino group of X¹ is part of an optionally substituted ring. In some embodiments, X¹ is an amino acid as described herein (e.g., of formula A-I, A-II, A-III, etc.), wherein R^{a1} and R^{a3} are taken together to form an optionally substituted ring, e.g., an optionally substituted 3-10 membered ring. In some embodiments, R^{a1} and R^{a3} are taken together with their intervening atoms to form an optionally substituted 3-10 membered saturated or partially saturated ring having, in addition to the intervening atoms, 0-5 heteroatoms. In some embodiments, a formed ring is saturated. In some embodiments, a formed ring is monocyclic. In some embodiments, a formed ring has no heteroatoms in addition to the intervening atoms. In some embodiments, L^{a1} and L^{a2} are covalent bond. In some embodiments, a formed ring is unsubstituted. In some embodiments, a formed ring is substituted. In some embodiments, a substitute comprises a double bond which is suitable for metathesis with another double bond to form a staple. In some embodiments, X¹ is Pro. In some embodiments, X¹ is alphaMePro (methyl replacing —H at alpha carbon). In some embodiments, X¹ comprises a hydrophobic side chain. In some embodiments, side chain of X¹ comprises an optionally substituted aromatic ring. In some embodiments, X¹ is Phe. In some embodiments, X¹ is Ala. In some embodiments, none of R^{a2} and R^{a3} are hydrogen. In some embodiments, X¹ is Aib. In some embodiments, X¹ is comprises a side chain which comprises an acidic group, e.g., —COOH. In some embodiments, X¹ is Asp. In some embodiments, X¹ is an amino acid reside suitable for stapling. In some embodiments, X¹ comprises a double bond, e.g., a terminal double bond in its side chain. In some embodiments, X¹ is PL3.

[0674] In some embodiments, X¹ is an amino acid reside suitable for stapling.

[0675] In some embodiments, an amino acid residue suitable for stapling comprises a double bond, e.g., a terminal double bond in its side chain. In some embodiments, it has a side chain having the structure of -L^{a}-CH═CH₂. In some embodiments, it is a residue of an amino acid having the structure of formula A-II or A-III or a salt thereof. In some embodiments, X¹ is —N(R^{a1})-L^{a1}-C(-L^{a}-CH═CH₂)(R^{a3})-L^{a2}-C(O)—, wherein each variable is independently as described herein. In some embodiments, X¹ is —N(R^{a1})—C(-L^{a}-CH═CH₂)(R^{a3})—C(O)—, wherein each variable is independently as described herein. In some embodiments, X¹ is a residue of PL3 and stapled.

[0676] In some embodiments, X¹ is or comprises a residue of an amino acid or a moiety selected from Table A-I, Table A-II, Table A-III and Table A-IV.

[0677] In some embodiments, X¹ is a residue of Bn3OAllyl, BzAm3Oallyl, HypBzEs3OAllyl, HypEs4, HypEs5, HypPAc3OAllyl, MePro, NMebAla, PAc3OAllyl, ProAm5, ProAm6, ProBzAm3OAllyl, ProPAc3OAllyl, ProSAm3, PyrR, Sar, Aib, Ala, Asp, Gly, Phe, PL3, Pro, R3, or R5.

[0678] In some embodiments, X¹ is a residue of Bn3OAllyl, BzAm3Oallyl, HypBzEs3OAllyl, HypEs4, HypEs5, HypPAc3OAllyl, MePro, NMebAla, PAc3OAllyl, ProAm5, ProAm6, ProBzAm3OAllyl, ProPAc3OAllyl, ProSAm3, PyrR, or Sar.

[0679] In some embodiments, X¹ is a residue of Aib, Ala, Asp, Gly, Phe, PL3, Pro, R3, or R5.

[0680] In some embodiments, X¹ is stapled (a staple bonds to X¹). In some embodiments, X¹ is PL3 and stapled. In some embodiments, X¹ is stapled with X⁴. In some embodiments, a staple connecting a pair of amino acid residues, e.g., X¹ and X⁴, has the structure of L^{s}, -L^{s1}-L^{s2}-L^{s3}-, wherein L^{s1} is L^{a} of one amino acid residue, e.g., X¹, and L^{s3} is L^{a} of the other amino acid residue, e.g., X⁴.

[0681] As described herein, in some embodiments, a staple is L^{s}. In some embodiments, L^{s1} is L^{a} of one amino acid residue of a pair of stapled amino acid residues, and L^{s3} is L^{a} of the other amino acid residue of a pair of stapled amino acid residues. In some embodiments, L^{s} is -L^{a}-L^{s2}-L^{a}-, wherein each variable is independently as described herein. Various embodiments of L^{a} are described herein. In some embodiments, L^{s1} is an optionally substituted bivalent linear or branched C₁₋₁₀ hydrocarbon chain. In some embodiments, L^{s3} is an optionally substituted bivalent linear or branched C₁₋₁₀ hydrocarbon chain. In some embodiments, each of L^{s1} and L^{s3} is independently an optionally substituted bivalent linear or branched C₁₋₁₀ hydrocarbon chain. In some embodiments, each of L^{s1} and L^{s3} is independently —(CH₂)ₙ—, wherein n is 1-10. In some embodiments, L^{s1} is —CH₂—. In some embodiments, L^{s3} is —(CH₂)₃—.

[0682] In some embodiments, L^{s2} is L as described herein. In some embodiments, L is optionally substituted —CH═CH—. In some embodiments, L is optionally substituted —CH₂—CH₂—. In some embodiments, L is —CH₂—CH₂—.

[0683] In some embodiments, L^{s} is —CH₂—CH═CH—(CH₂)₃—. In some embodiments, L^{s} is —(CH₂)₆—. In some embodiments, such a staple connects X¹ and X⁴. In some embodiments, such a staple may connect other pairs of stapled amino acid residues.

[0684] In some embodiments, a staple, e.g., L^{s}, is bonded to two backbone atoms. In some embodiments, it is bonded to two carbon backbone atoms. In some embodiments, it is independently bonded to an alpha carbon atom of an amino acid residue at each end.

[0685] Various types of amino acid residues can be used for X², e.g., a residue of an amino acid of formula A-I, A-II, A-III, A-IV, A-V, A-VI, etc. or a salt thereof in accordance with the present disclosure. In some embodiments, X² is —N(R^{a1})-L^{a1}-C(R^{a2})(R^{a3})-L^{a2}-C(O)—, wherein each variable is independently as described herein. In some embodiments, X² is —N(R^{a1})—C(R^{a2})(R^{a3})—C(O)—, wherein each variable is independently as described herein. In some embodiments, X² is —N(R^{a1})—C(R^{a2})H—C(O)—, wherein each variable is independently as described herein. In some embodiments, R^{a1} is —H. In some embodiments, R^{a3} is —H.

[0686] In some embodiments, X² is a residue of amino acid that comprises an acidic or polar group. In some embodiments, X² is a residue of amino acid whose side chain comprises an acidic group, e.g., a —COOH group or a salt form thereof (e.g., a compound of formula A-IV, etc.) (in some embodiments, may be referred to as an “acidic amino acid residue”).

[0687] In some embodiments, an amino acid residue whose side chain comprises an acidic group comprises —COOH in its side chain. In some embodiments, it is a residue of an amino acid having the structure of formula A-IV or a salt thereof. In some embodiments, it is a residue of amino acid having the structure of formula PA, PA-a, PA-b, PA-c, etc. In some embodiments, RPA is —H and R^{PS} and R^{PC} are —OH. In some embodiments, it is —N(R^{a1})-L^{a1}-C(-L^{a}-COOH)(R^{a3})-L^{a2}-C(O)—. In some embodiments, it is —NH-L^{a1}-C(-L^{a}-COOH)(R^{a3})-L^{a2}-C(O)—. In some embodiments, it is —NH—CH(-L^{a}-COOH)—C(O)—.

[0688] As described herein, L^{a} is L as described herein. In some embodiments, L is an optionally substituted bivalent linear or branched C₁₋₁₀ hydrocarbon chain wherein one or more methylene units of L are independently replaced with —C(O)—, —N(R′)—, -Cy- or —O—. In some embodiments, L is an optionally substituted bivalent linear C₁₋₁₀ hydrocarbon chain wherein one or more methylene units of L are independently replaced with —C(O)—, —N(R′)—, -Cy- or —O—. In some embodiments, L is an optionally substituted bivalent linear or branched C₁₋₁₀ hydrocarbon chain. In some embodiments, L is an optionally substituted bivalent linear C₁₋₁₀ hydrocarbon chain. In some embodiments, L is a bivalent linear or branched C₁₋₁₀ hydrocarbon chain. In some embodiments, L is a bivalent linear C₁₋₁₀ hydrocarbon chain. In some embodiments, L is optionally substituted —(CH₂)ₙ— wherein n is 1-10. In some embodiments, L is —(CH₂)ₙ—. In some embodiments, L is —CH₂—. In some embodiments, L is —(CH₂)₂—. In some embodiments, L is —(CH₂)₃—. In some embodiments, L is —(CH₂)₄—.

[0689] In some embodiments, X² is a residue of Asp, Glu, RbGlu, SbGlu, NMeD, and isoDAsp. In some embodiments, X² is a residue of Asp, Glu, RbGlu, SbGlu, and isoDAsp. In some embodiments, X² is a residue of Asp. As appreciated by those skilled in the art, at physiological pH (about pH 7.4), an acidic group such as —COOH may exist, in some embodiments, predominantly, as its negatively charged form, e.g., —COO⁻.

[0690] In some embodiments, X² is a residue of amino acid (e.g., of formula A-I, A-II, A-III, A-IV, A-V, A-VI, etc. or a salt thereof) whose side chain comprises a polar group (in some embodiments, may be referred to as a “polar amino acid residue”; in some embodiments, it does not include amino acid residue whose side chains are electrically charged at, e.g., about pH 7.4).

[0691] In some embodiments, an amino acid residue whose side chain comprises a polar group is —N(R^{a1})-L^{a1}-C(R^{a2})(R^{a3})-L^{a2}-C(O)—. In some embodiments, an amino acid residue whose side chain comprises a polar group is —N(R^{a1})—C(R^{a2})(R^{a3})—C(O)—. In some embodiments, an amino acid residue whose side chain comprises an amide group, e.g., —C(O)N(R′)₂ such as —CONH₂. In some embodiments, R^{a2} is -L^{a}-C(O)N(R′)₂ wherein each variable is independently as described herein. In some embodiments, R^{a2} is -L^{a}-C(O)NH₂ wherein L is independently as described herein. In some embodiments, L^{a} is L′ as described herein. In some embodiments, R^{a3} is H. In some embodiments, such a polar amino acid residue is Asn. In some embodiments, it is MeAsn. In some embodiments, an amino acid residue whose side chain comprises a polar group is an amino acid residue whose side chain comprises —OH. In some embodiments, R^{a2} is -L^{a}-OH wherein each variable is independently as described herein. In some embodiments, R^{a2} is -L^{a}-OH wherein L is independently as described herein. In some embodiments, L^{a} is L′ as described herein. For example, in some embodiments, such an amino acid residue is a residue of Hse, Ser, aThr, or Thr. In some embodiments, it is a residue of Hse, Ser, or aThr. In some embodiments, it is a residue of Hse. In some embodiments, it is a residue of Ser. In some embodiments, it is a residue of aThr. In some embodiments, it is a residue of Thr. Other polar amino acid residues are described herein and can be utilized at various amino acid residue positions.

[0692] In some embodiments, X² is a residue of amino acid whose side chain comprises —OH. For example, in some embodiments, X² is a residue of Hse. In some embodiments, X² is a residue of amino acid whose side chain comprises an amide group, e.g., —CONH₂. For example, in some embodiments, X² is a residue of Asn.

[0693] In some embodiments, X² comprises a side chain which is hydrophobic, is aliphatic, is aromatic, etc.

[0694] In some embodiments, X² is a residue of Asp, Asn, RbGlu, Phe, Glu, Ile, NMeD, Ala, Dab, Gln, His, Hse, isoDAsp, Leu, Ser, tetz, [MeSO2]Dap, [Tf]Dap, 3FF, 3MeF, SbGlu, or Tyr. In some embodiments, X² is selected from Asp, Hse, Asn, Glu, RbGlu, SbGlu, and isoDAsp (as appreciated by those skilled in the art, an amino acid code can refer to an amino acid and/or a residue thereof depending on context).

[0695] In some embodiments, X² is or comprises a residue of an amino acid or a moiety selected from Table A-IV.

[0696] In some embodiments, X² is a residue of [CH2CMe2CO2H]TriAzDap, [CMe2CO2H]TriAzDap, [Et]AspE, [EtSSEt]AspE, [EtSSHex]AspE, [EtSSPh]AspE, [EtSSpy]AspE, [Me]AspE, AcAsp, AspSH, RbOHAsp, [MeSO2]Dap, [Tf]Dap, 2COOHF, 3COOHF, 3FF, 3MeF, 4Thz, 4Tria, Aad, Ala, Asn, Asp, Dab, Gln, Glu, His, Hse, Ile, isoDAsp, Leu, NMeD, Phe, PL3, R3, R5, RbGlu, SbGlu, Ser, tetz, TfeGA, Thr, or Tyr.

[0697] In some embodiments, X² is a residue of [CH2CMe2CO2H]TriAzDap, [CMe2CO2H]TriAzDap, [Et]AspE, [EtSSEt]AspE, [EtSSHex]AspE, [EtSSPh]AspE, [EtSSpy]AspE, [Me]AspE, AcAsp, AspSH, or RbOHAsp.

[0698] In some embodiments, X² is a residue of [MeSO2]Dap, [Tf]Dap, 2COOHF, 3COOHF, 3FF, 3MeF, 4Thz, 4Tria, Aad, Ala, Asn, Asp, Dab, Gln, Glu, His, Hse, Ile, isoDAsp, Leu, NMeD, Phe, PL3, R3, R5, RbGlu, SbGlu, Ser, tetz, TfeGA, Thr, or Tyr.

[0699] Various types of amino acid residues can be used for X³, e.g., a residue of an amino acid of formula A-I, A-II, A-III, A-IV, A-V, A-VI, etc. or a salt thereof in accordance with the present disclosure. In some embodiments, X³ is —N(R^{a1})-L^{a1}-C(R^{a2})(R^{a3})-L^{a2}-C(O)—, wherein each variable is independently as described herein. In some embodiments, X³ is —N(R^{a1})—C(R^{a2})(R^{a3})—C(O)—, wherein each variable is independently as described herein. In some embodiments, X³ is —N(R^{a1})—C(R^{a2})H—C(O)—, wherein each variable is independently as described herein. In some embodiments, R^{a1} is —H. In some embodiments, R^{a3} is —H.

[0700] In some embodiments, L^{a} is L as described herein. In some embodiments, L is an optionally substituted bivalent linear or branched C₁₋₁₀ hydrocarbon chain. In some embodiments, L is an optionally substituted bivalent linear C₁₋₁₀ hydrocarbon chain. In some embodiments, L is —(CH₂)ₙ—, wherein n is 1-10. In some embodiments, L is —CH₂—. In some embodiments, L is —(CH₂)₂—. In some embodiments, L is —(CH₂)₃—. In some embodiments, L is —(CH₂)₄—. In some embodiments, L is an optionally substituted bivalent linear or branched C₁₋₁₀ hydrocarbon chain wherein one or more methylene units of L are independently replaced with —C(O)—, —N(R′)—, -Cy- or —O—. In some embodiments, L is an optionally substituted bivalent linear C₁₋₁₀ hydrocarbon chain wherein one or more methylene units of L are independently replaced with —C(O)—, —N(R′)—, -Cy- or —O—. In some embodiments, L is an optionally substituted bivalent linear or branched C₁₋₁₀ hydrocarbon chain. In some embodiments, L is an optionally substituted bivalent linear C₁₋₁₀ hydrocarbon chain. In some embodiments, L is a bivalent linear or branched C₁₋₁₀ hydrocarbon chain. In some embodiments, L is —CH₂—. In some embodiments, L is —CH₂—N(R′)—CH₂—. In some embodiments, R′ is Bn. In some embodiments, R′ is —C(O)R. In some embodiments, R is phenyl. In some embodiments, R is t-butyl. In some embodiments, R is cyclohexyl.

[0701] In some embodiments, X³ is a hydrophobic amino acid residue.

[0702] In some embodiments, a hydrophobic amino acid residue is an amino acid residue whose side chain is an optionally substituted aliphatic group. In some embodiments, it is a residue of an amino acid whose side chain is optionally substituted C₁₋₁₀ alkyl. In some embodiments, it is a residue of an amino acid whose side chain is C₁₋₁₀ alkyl. In some embodiments, it is a residue of an amino acid whose side chain is C₁₋₁₀ aliphatic optionally substituted with one or more non-polar and non-charged groups. In some embodiments, it is a residue of an amino acid whose side chain is C₁₋₁₀ alkyl optionally substituted with one or more non-polar and non-charged groups. In some embodiments, it is a residue of an amino acid whose side chain is C₁₋₁₀ aliphatic optionally substituted with one or more hydrophobic substituents. In some embodiments, it is a residue of an amino acid whose side chain is C₁₋₁₀ aliphatic. In some embodiments, it is a residue of an amino acid whose side chain is C₁₋₁₀ alkyl. Various hydrophobic amino acid residues can be utilized in accordance with the present disclosure.

[0703] In some embodiments, a hydrophobic amino acid residue, e.g., X³, has the structure of —NH₂—C(R^{a2})(R^{a3})—C(O)— or —NH—C(R^{a2})H—C(O)— wherein each variable is independently as described herein. As described herein, R^{a2} is -L^{a}-R′. In some embodiments, R′ is R as described herein. In some embodiments, R is optionally substituted group selected from C₁₋₁₀ aliphatic, phenyl, 10-membered aryl, and 5-10 membered heteroaryl having 1-5 heteroatoms. In some embodiments, each substituent, if any, is independently a non-polar group. In some embodiments, R is optionally substituted C₁₋₁₀ aliphatic. In some embodiments, R is optionally substituted C₁₋₁₀ alkyl. In some embodiments, R is C₁₋₁₀ aliphatic. In some embodiments, R is C₁₋₁₀ alkyl. For example, in some embodiments, R is methyl. In some embodiments, R is isopropyl. In some embodiments, R is 1-methylpropyl. In some embodiments, R is 2-methylpropyl. In some embodiments, R is optionally substituted aryl. In some embodiments, R is aryl. In some embodiments, R is optionally substituted phenyl. In some embodiments, R is phenyl. In some embodiments, R is optionally substituted 5−6 membered heteroaryl having 1-4 heteroatoms. In some embodiments, R is optionally substituted 5−6 membered heteroaryl having 1 heteroatom. In some embodiments, R is 5−6 membered heteroaryl having 1-4 heteroatoms. In some embodiments, R is 5−6 membered heteroaryl having 1 heteroatom. In some embodiments, R is optionally substituted 9-10 membered heteroaryl having 1-5 heteroatoms. In some embodiments, R is optionally substituted 9-10 membered heteroaryl having 1 heteroatom. In some embodiments, R is 9-10 membered heteroaryl having 1-4 heteroatoms. In some embodiments, R is 9-10 membered heteroaryl having 1 heteroatom. In some embodiments, a heteroatom is nitrogen. In some embodiments, a heteroatom is oxygen. In some embodiments, L is an optionally substituted bivalent linear or branched C₁₋₁₀ hydrocarbon chain. In some embodiments, L is an optionally substituted bivalent linear C₁₋₁₀ hydrocarbon chain. In some embodiments, L is a bivalent linear or branched C₁₋₁₀ hydrocarbon chain. In some embodiments, L is a bivalent linear C₁₋₁₀ hydrocarbon chain. In some embodiments, L is optionally substituted —(CH₂)ₙ—, wherein n is 1-10. In some embodiments, L is —(CH₂)ₙ—, wherein n is 1-10. In some embodiments, L is —CH₂—. In some embodiments, L is —(CH₂)₂—. In some embodiments, L is —(CH₂)₃—. In some embodiments, L is —(CH₂)₄—. In some embodiments, L is an optionally substituted bivalent linear or branched C₁₋₁₀ hydrocarbon chain wherein one or more methylene units of L are independently replaced with —C(O)—, —N(R′)—, -Cy- or —O—. In some embodiments, L is an optionally substituted bivalent linear C₁₋₁₀ hydrocarbon chain wherein one or more methylene units of L are independently replaced with —C(O)—, —N(R′)—, -Cy- or —O—. In some embodiments, a hydrophobic amino acid residue is a residue of Ala, Val, Ile, Leu, Met, Phe, Tyr, Trp, etc. Other hydrophobic amino acid residues are described herein and can be utilized at various amino acid residue positions.

[0704] In some embodiments, X³ comprises a side chain comprising a cycloaliphatic group (e.g., a 4-, 5-, or 6-membered cycloalkyl group).

[0705] In some embodiments, X³ comprises a side chain which is or comprises an optionally substituted aromatic group (in some embodiments, may be referred to as an “aromatic amino acid residue”).

[0706] In some embodiments, an aromatic amino acid residue has a side chain which is or comprises an optionally substituted aromatic group. In some embodiments, an aromatic amino acid residue, e.g., X³, has the structure of —NH₂—C(R^{a2})(R^{a3})—C(O)— or —NH—C(R^{a2})H—C(O)— wherein each variable is independently as described herein, and R^{a2} comprises an optionally substituted aromatic group.

[0707] In some embodiments, an aromatic amino acid residue has a side chain which is or comprises an optionally substituted aromatic group, wherein each substituent of the aromatic group is independently halogen. In some embodiments, it comprises a side chain which is or comprises two optionally substituted aromatic groups. In some embodiments, it comprises a side chain which is or comprises an optionally substituted aromatic group, wherein each substituent of the aromatic group is independently selected from halogen or —OH. In some embodiments, an aromatic group is phenyl. In some embodiments, an aromatic group is optionally substituted 8-10 membered bicyclic aryl or heteroaryl having 0-5 heteroatoms. In some embodiments, an aromatic group is optionally substituted 9-10 membered bicyclic aryl or heteroaryl having one heteroatom. In some embodiments, it is a residue of an amino acid of formula A-I or a salt thereof. In some embodiments, an amino acid residue has the structure of —NH—C(R^{a2})(R^{a3})—C(O)— or —NH—CH(R^{a3})—C)O)—. As described herein, R^{a3} is -L^{a}-R′ wherein each variable is independently as described herein. In some embodiments, R′ is an optionally substituted group selected from phenyl, 10-membered bicyclic aryl, 5−6 membered heteroaryl having 1-4 heteroatoms, and 9-10 membered bicyclic heteroaryl having 1-5 heteroatoms. In some embodiments, each substituent is independently halogen or —OH. In some embodiments, R′ is optionally substituted phenyl. In some embodiments, R′ is phenyl. In some embodiments, R′ is optionally substituted aryl. In some embodiments, R′ is aryl. In some embodiments, R′ is optionally substituted 5-membered heteroaryl having 1-4 heteroatoms. In some embodiments, R′ is optionally substituted 5-membered heteroaryl having 1 heteroatom. In some embodiments, R′ is 5−6 membered heteroaryl having 1-4 heteroatoms. In some embodiments, R′ is 5−6 membered heteroaryl having 1 heteroatom. In some embodiments, R′ is optionally substituted 9-10 membered heteroaryl having 1-5 heteroatoms. In some embodiments, R′ is optionally substituted 9-10 membered heteroaryl having 1 heteroatom. In some embodiments, R′ is 9-10 membered heteroaryl having 1-4 heteroatoms. In some embodiments, R′ is 9-10 membered heteroaryl having 1 heteroatom. In some embodiments, a heteroatom is nitrogen. In some embodiments, a heteroatom is oxygen. In some embodiments, a heteroatom is sulfur. In some embodiments, L^{a} is a covalent bond. In some embodiments, L^{a} is optionally substituted —(CH₂)ₙ— wherein n is 1-10. In some embodiments, L^{a} is —(CH₂)ₙ—. In some embodiments, n is 1. In some embodiments, n is 2. In some embodiments, n is 3. In some embodiments, L^{a} is —CH(Ph)-. In some embodiments, an aromatic amino acid residue is Phe. In some embodiments, an aromatic amino acid residue is Tyr. In some embodiments, an aromatic amino acid residue is Trp. Other aromatic amino acid residues are described herein and can be utilized at various amino acid residue positions.

[0708] In some embodiments, X³ is a residue of an amino acid suitable for stapling as described herein. In some embodiments, X³ is —N(R^{a1})-L^{a1}-C(-L^{a}-CH═CH₂)(R^{a3})-L^{a2}-C(O)—, wherein each variable is independently as described herein. In some embodiments, X³ is —N(R^{a1})—C(-L^{a}-CH═CH₂)(R^{a3})—C(O)—, wherein each variable is independently as described herein. In some embodiments, a methylene unit of L^{a} is replaced with —N(R′)— or —N(R′)C(O)O—. In some embodiments, R′ of —N(R′)— or —N(R′)C(O)O— and R^{a3} are taken together with their intervening atoms to form an optionally substituted 3-10 membered ring having 0-5 heteroatoms in addition to the intervening atoms. In some embodiments, there are no heteroatoms in addition to the intervening atoms. In some embodiments, there are no heteroatoms in addition to the nitrogen to which R′ is attached. In some embodiments, a formed ring is monocyclic. In some embodiments, a formed ring is saturated. In some embodiments, a formed ring is 3-membered. In some embodiments, a formed ring is 4-membered. In some embodiments, a formed ring is 5-membered. In some embodiments, a formed ring is 6-membered.

[0709] In some embodiments, X³ is a residue of an amino acid comprising a double bond, e.g., a terminal olefin, suitable for stapling. In some embodiments, X³ is a residue of an amino acid having the structure of A-II, A-III, etc. In some embodiments, X³ is a residue of RdN. In some embodiments, X³ is a residue of S8. In some embodiments, X³ is stapled. In some embodiments, X³ is stapled with X¹⁰.

[0710] In some embodiments, X³ is a residue of an amino acid having the structure of formula A-I, A-II, A-III, etc.

[0711] In some embodiments, X³ is a residue of an amino acid whose side chain is hydrophobic. In some embodiments, X³ is a residue of an amino acid whose side chain is an optionally substituted aliphatic group. In some embodiments, X³ is a residue of an amino acid whose side chain is optionally substituted C₁₋₁₀ alkyl. In some embodiments, X³ is a residue of an amino acid whose side chain is C₁₋₁₀ alkyl. In some embodiments, X³ is a residue of an amino acid whose side chain is C₁₋₁₀ alkyl optionally substituted with one or more non-polar and non-charged groups. In some embodiments, X³ is a residue of an amino acid whose side chain is C₁₋₁₀ alkyl optionally substituted with one or more substituents independently selected from halogen, —SR and —OR, where each R is independently C₁₋₄ alkyl. In some embodiments, X³ is a residue of an amino acid whose side chain is C₁₋₁₀ alkyl optionally substituted with one or more substituents independently selected from halogen, —SR and —OR, where each R is independently C₁₋₄ alkyl. In some embodiments, R is methyl. In some embodiments, X³ is a residue of Npg, Ala, Ile, Leu, Cha, Abu, hLeu, Val, F3CA, aIle, Nva, TOMe, S(Ome), nLeu, or HF2CA. In some embodiments, X³ is a residue of an amino acid whose side chain comprises an optionally substituted aromatic group. In some embodiments, X³ is a residue of an amino acid whose side chain comprises a hydrocarbon aromatic group. In some embodiments, X³ is a residue of NpG. Phe, 1NapA, or 2NapA.

[0712] In some embodiments, X³ is a residue of an amino acid whose side chain comprises a polar group, e.g., Gln, Hse, Ser, Asn, [AzAc]Lys, Thr, Asn, Ser, etc.

[0713] In some embodiments, X³ is a residue of Npg, Ala, Ile, Leu, Cha, Phe, Abu, hLeu, RdN, 1NapA, 2NapA, R8, Val, F3CA, [AzAc]Lys, Gln, aIle, Nva, TOMe, hSe, S(Ome), nLeu, Thr, Asn, Ser, or HF2CA.

[0714] In some embodiments, X³ is or comprises a residue of an amino acid or a moiety selected from Table A-I, Table A-II, Table A-III and Table A-IV.

[0715] In some embodiments, X³ is a residue of [lithocholate]-Lys, [lithocholate-PEG2]-Lys, [Me3AdamantC]-Lys, [Me3AdamantC-PEG2]-Lys, Npa, 1NapA, 2NapA, Abu, aIle, Ala, Asn, Asp, B5, Cha, F3CA, Gln, Glu, HF2CA, hLeu, hSe, Ile, iPrLys, Leu, Lys, nLeu, Npg, Nva, Phe, R8, RdN, S(Ome), Ser, TfeGA, Thr, TOMe, Trp, Tyr, or Val.

[0716] In some embodiments, X³ is a residue of [lithocholate]-Lys, [lithocholate-PEG2]-Lys, [Me3AdamantC]-Lys, [Me3AdamantC-PEG2]-Lys, or Npa.

[0717] In some embodiments, X³ is a residue of 1NapA, 2NapA, Abu, aIle, Ala, Asn, Asp, B5, Cha, F3CA, Gln, Glu, HF2CA, hLeu, hSe, Ile, iPrLys, Leu, Lys, nLeu, Npg, Nva, Phe, R8, RdN, S(Ome), Ser, TfeGA, Thr, TOMe, Trp, Tyr, or Val.

[0718] Various types of amino acid residues can be used for X⁴, e.g., a residue of an amino acid of formula A-I, A-II, A-III, A-IV, A-V, A-VI, etc. or a salt thereof in accordance with the present disclosure. In some embodiments, X⁴ is a residue of an amino acid of formula A-I, A-II, A-III, A-IV, A-V, A-VI, etc. or a salt thereof. In some embodiments, X⁴ is a residue of an amino acid of formula A-II or salt thereof. In some embodiments, X⁴ is a residue of an amino acid of formula A-III or salt thereof. In some embodiments, X⁴ is a residue of an amino acid of formula A-IV or salt thereof. In some embodiments, X⁴ is a residue of an amino acid of formula A-V or salt thereof. In some embodiments, X⁴ is a residue of an amino acid of formula A-VI or salt thereof. In some embodiments, X⁴ is —N(R^{a1})-L^{a1}-C(R^{a2})(R^{a3})-L^{a2}-C(O)—, wherein each variable is independently as described herein. In some embodiments, X⁴ is —N(R^{a1})—C(R^{a2})(R^{a3})—C(O)— wherein each variable is independently as described herein. In some embodiments, X⁴ is —N(R^{a1})—C(R^{a2})H—C(O)— wherein each variable is independently as described herein. In some embodiments, R^{a2} is -L^{a}-CH═CH₂, wherein L^{a} is as described herein. In some embodiments, R^{a3} is -L^{a}-CH═CH₂, wherein L^{a} is as described herein. In some embodiments, X⁴ is —N(R^{a1})-L^{a1}-C(-L^{a}-R^{SP1})(-L^{a}-R^{SP2})-L^{a2}-C(O)— wherein each variable is independently as described herein. In some embodiments, X⁴ is —N(R^{a1})—C(-L^{a}-R^{SP1}X-L^{a}-R^{SP2})—C(O)— wherein each variable is independently as described herein. In some embodiments, R^{a1} is —H. In some embodiments, R^{a3} is —H.

[0719] In some embodiments, each of R^{SP1} and R^{SP2} is or comprises independently optionally substituted —CH═CH₂. In some embodiments, each of R^{SP1} and R^{SP2} is independently —CH═CH₂. In some embodiments, each of -L^{a}-connected R^{SP1} or R^{SP2} is independent L as described herein. In some embodiments, L is an optionally substituted bivalent linear or branched C₁₋₁₀ hydrocarbon chain. In some embodiments, L is an optionally substituted bivalent linear C₁-10 hydrocarbon chain. In some embodiments, L is a bivalent linear or branched C₁₋₁₀ hydrocarbon chain. In some embodiments, L is a bivalent linear C₁₋₁₀ hydrocarbon chain. In some embodiments, L is optionally substituted —(CH₂)ₙ—, wherein n is 1-10. In some embodiments, L is —(CH₂)ₙ—, wherein n is 1-10. In some embodiments, L is —CH₂—. In some embodiments, L is —(CH₂)₂—. In some embodiments, L is —(CH₂)₃—. In some embodiments, L is —(CH₂)₄—. In some embodiments, L is an optionally substituted bivalent linear or branched C₁₋₁₀ hydrocarbon chain wherein one or more methylene units of L are independently replaced with —C(O)—, —N(R′)—, -Cy- or —O—. In some embodiments, L is an optionally substituted bivalent linear C₁₋₁₀ hydrocarbon chain wherein one or more methylene units of L are independently replaced with —C(O)—, —N(R′)—, -Cy- or —O—.

[0720] In some embodiments, X⁴ is residue of an amino acid suitable for stapling as described herein. In some embodiments, X⁴ is a residue of an amino acid which comprises two functional groups suitable for stapling. In some embodiments, X⁴ is a residue of an amino acid which comprises one and only one functional group suitable for stapling. In some embodiments, X⁴ is a residue of an amino acid which comprises two olefins, e.g., two terminal olefins. In some embodiments, X⁴ is a residue of an amino acid which comprises one and only one double bond for stapling, e.g., a terminal olefin. In some embodiments, X⁴ is a residue of an amino acid which has the structure of formula A-I, A-II, A-III, etc., wherein both R^{a2} and R^{a3} are independently -L^{a}-CH═CH₂, wherein each L^{a} is independently as described herein. In some embodiments, X⁴ is a residue of an amino acid which has the structure of formula A-I, A-II, A-III, etc., wherein only one of R^{a2} and R^{a3} is -L^{a}-CH═CH₂, wherein each L^{a} is independently as described herein. In some embodiments, each L^{a} is independently optionally substituted bivalent C₁₋₁₀ alkylene or heteroalkylene. In some embodiments, each L^{a} is independently optionally substituted —(CH₂)ₙ— wherein n is 1-10. In some embodiments, n is 1. In some embodiments, n is 2. In some embodiments, n is 3. In some embodiments, n is 4. In some embodiments, n is 5. In some embodiments, n is 6. In some embodiments, n is 7. In some embodiments, n is 8. In some embodiments, n is 9. In some embodiments, n is 10. In some embodiments, X⁴ is B5. In some embodiments, X⁴ is R8, RdN, R5, RgN, ReN, R7, Az, R6, or R4.

[0721] In some embodiments, X⁴ is stapled. In some embodiments, X⁴ is connected to two residues independently through two staples (e.g., when X⁴ is B5). In some embodiments, X⁴ is staple with X¹, and X⁴ is stapled with X¹¹.

[0722] As described herein, various staples may be utilized for connecting stapled amino acid residues. In some embodiments, a staple is L^{s} as described herein. In some embodiments, each staple connected to X⁴ is independently L^{s} as described herein.

[0723] In some embodiments, L^{s} is -L^{s1}-L^{s2}-L^{s3}-, wherein each variable is independently as described herein. In some embodiments, one of L^{s1} and L^{s3} is L^{a} of one of two stapled amino acid residues, and the other is L^{a} of the other of two stapled amino acid residues. In some embodiments, L^{s3} is L^{a} of X⁴, e.g., when X⁴ is stapled with an amino acid residue to its N-terminus side (e.g., X¹). In some embodiments, L^{s1} is L^{a} of X⁴, e.g., when X⁴ is stapled with an amino acid residue to its C-terminus side (e.g., X¹). In some embodiments, L^{s1} is L^{a} of X¹, and L^{s3} is L^{a} of X⁴. In some embodiments, L^{s1} is L^{a} of X⁴, and L^{s3} is L^{a} of X¹. In some embodiments, two staples are bonded to X⁴, wherein a first staple staples X⁴ with an amino acid residue to the N-terminus side of X⁴ (an amino acid residue to a N-terminus side of a reference amino acid residue may be referred to as “N-direction amino acid residue” of the reference amino acid residue, e.g., X¹ is a N-direction amino acid residue of X⁴), wherein the first staple is L^{s}having the structure of -L^{s1}-L^{s2}-L^{s3}-, wherein L^{s1} is L^{a} of the N-direction amino acid residue, and L^{s3} is L^{a} of X⁴, and wherein a second staple staples X⁴ with an amino acid residue to the C-terminus side of X⁴ (an amino acid residue to a C-terminus side of a reference amino acid residue may be referred to as “C-direction amino acid residue” of the reference amino acid residue, e.g., X¹ is a C-direction amino acid residue of X⁴), wherein the second staple is L^{s} having the structure of -L^{s1}-L^{s2}-L^{s3}-, wherein L^{s3} is L^{a} of the C-direction amino acid residue, and L^{s1} is L^{a} of X⁴. Various embodiments of L^{a} are described herein and can be utilized for various amino acid residues including X⁴ and N-direction (e.g., X¹) and C-direction (e.g., X¹) amino acid residues. For example, in some embodiments, for X⁴ each L^{a} is —(CH₂)₃—.

[0724] As described herein, in some embodiments, L^{s2} is optionally substituted —CH═CH—. In some embodiments, L^{s2} is —CH═CH—. In some embodiments, L^{s2} is optionally substituted —CH₂—CH₂—. In some embodiments, L^{s2} is —CH₂—CH₂—.

[0725] In some embodiments, as described herein, each staple is independently bonded to two alpha carbon atoms of two stapled amino acid residues.

[0726] In some embodiments, X⁴ is stapled with two amino acid residues, e.g., X¹ and X¹¹. In some embodiments, X⁴ is stapled with only one residue, e.g., X¹¹ (e.g., when X⁴ is a residue of R5, R4, or R6). In some embodiments, X⁴ is —N(R^{a1})-L^{a1}-C(-L^{a}-CH═CH₂)(R^{a3})-L^{a2}-C(O)— wherein each variable is independently as described herein. In some embodiments, X⁴ is —N(R^{a1})—C(-L^{a}-CH═CH₂)(R^{a3})—C(O)— wherein each variable is independently as described herein. In some embodiments, X⁴ is a residue of R4. In some embodiments, X⁴ is a residue of R5. In some embodiments, X⁴ is a residue of R6.

[0727] In some embodiments, a staple is L^{s} as described herein. For example, in some embodiments, L^{s1} is L^{a} of a first amino acid residue of two stapled amino acid residues, e.g., X⁴, and L^{s3} is L^{a} of a second amino acid residue of two stapled amino acid residues, e.g., X¹¹, wherein a second amino acid residue (e.g., X¹) is a C-direction amino acid residue of a first amino acid residue (e.g., X⁴).

[0728] In some embodiments, X⁴ is stapled. In some embodiments, X⁴ is connected to two residues independently through two staples (e.g., when X⁴ is B5). In some embodiments, X⁴ is stapled with X¹ and X¹¹. In some embodiments, X⁴ is stapled with only one residue, e.g., X¹¹ (e.g., when X⁴ is R8, RdN, R5, RgN, ReN, R7, Az, R6, or R4).

[0729] In some embodiments, X⁴ is not stapled (e.g., when other residues are optionally stapled). In some embodiments, X⁴ is a residue of an amino acid whose side chain is hydrophobic, comprises an optionally substituted aromatic group, or comprises an acid group (e.g., —COOH, which as those skilled in the art appreciate may exist as a salt form at certain conditions, e.g., certain pH). In some embodiments, X⁴ is Ala. is X⁴ is Asp.

[0730] In some embodiments, X⁴ is selected from B5, R8, RdN, R5, Ala, RgN, ReN, R7, Az, Asp, R6, and R4.

[0731] In some embodiments, X⁴ is or comprises a residue of an amino acid or a moiety selected from Table A-I, Table A-II, Table A-III and Table A-IV.

[0732] In some embodiments, X⁴ is a residue of B3, B4, B6, Aib, Ala, Asp, Az, B5, Npg, R3, R4, R5, R6, R7, R8, RdN, ReN, RgN, S3, S4, S5, or S6.

[0733] In some embodiments, X⁴ is a residue of B3, B4, or B6.

[0734] In some embodiments, X⁴ is a residue of Aib, Ala, Asp, Az, B5, Npg, R3, R4, R5, R6, R7, R8, RdN, ReN, RgN, S3, S4, S5, or S6.

[0735] Various types of amino acid residues can be used for X⁵, e.g., a residue of an amino acid of formula A-I, A-II, A-III, A-IV, A-V, A-VI, etc. or a salt thereof in accordance with the present disclosure. In some embodiments, X⁵ is —N(R^{a1})-L^{a1}-C(R^{a2})(R^{a3})-L^{a2}-C(O)—, wherein each variable is independently as described herein. In some embodiments, X⁵ is —N(R^{a1})—C(R^{a2})(R^{a3})—C(O)—, wherein each variable is independently as described herein. In some embodiments, X⁵ is —N(R^{a1})—C(R^{a2})H—C(O)—, wherein each variable is independently as described herein. In some embodiments, R^{a1} is —H. In some embodiments, R^{a3} is —H.

[0736] In some embodiments, X⁵ is a residue of an amino acid of formula A-IV or a salt thereof. In some embodiments, X⁵ is a residue of an amino acid of formula PA, PA-a, PA-b, PA-c, or a salt thereof. In some embodiments, R^{PA} is —H and R^{PS} and R^{PC} are —OH. In some embodiments, X⁵ is —N(R^{a1})-L^{a1}-C(-L^{a}-COOH)(R^{a3})-L^{a2}-C(O)— wherein each variable is independently as described herein. In some embodiments, X⁵ is —N(R^{a1})—C(-L^{a}-COOH)(R^{a3})—C(O)— wherein each variable is independently as described herein. In some embodiments, L^{a} is L as described herein. For example, in some embodiments, L is an optionally substituted bivalent linear or branched C₁₋₁₀ hydrocarbon chain. In some embodiments, L is an optionally substituted bivalent linear C₁₋₁₀ hydrocarbon chain. In some embodiments, L is a bivalent linear or branched C₁₋₁₀ hydrocarbon chain. In some embodiments, L is a bivalent linear C₁₋₁₀ hydrocarbon chain. In some embodiments, L is optionally substituted —(CH₂)ₙ—, wherein n is 1-10. In some embodiments, L is —(CH₂)ₙ—, wherein n is 1-10. In some embodiments, L is —CH₂—. In some embodiments, L is —(CH₂)₂—. In some embodiments, L is —(CH₂)₃—. In some embodiments, L is —(CH₂)₄—. In some embodiments, L is —CH(CH₃)—. In some embodiments, L is an optionally substituted bivalent linear or branched C₁₋₁₀ hydrocarbon chain wherein one or more methylene units of L are independently replaced with —C(O)—, —N(R′)—, -Cy- or —O—.

[0737] In some embodiments, X⁵ is a residue of amino acid that comprises an acidic or polar group. In some embodiments, X⁵ is a residue of amino acid whose side chain comprises an acidic group, e.g., a —COOH group or a salt form thereof (e.g., a compound of formula A-IV, etc.).

[0738] In some embodiments, X⁵ is a residue of Asp, Glu, RbGlu, SbGlu, NMeD, and isoDAsp. In some embodiments, X⁵ is a residue of Asp, Glu, RbGlu, SbGlu, and isoDAsp. In some embodiments, X⁵ is a residue of Asp. In some embodiments, X⁵ is a residue of Glu.

[0739] As appreciated by those skilled in the art, at physiological pH (about pH 7.4), an acidic group such as —COOH may exist, in some embodiments, predominantly, as its negatively charged form, e.g., —COO⁻.

[0740] In some embodiments, X⁵ is a residue of amino acid whose side chain comprises a polar group as described herein. In some embodiments, X⁵ is a residue of amino acid whose side chain comprises —OH. For example, in some embodiments, X⁵ is a residue of Hse. In some embodiments, X⁵ is a residue of Ser. In some embodiments, X⁵ is a residue of amino acid whose side chain comprises an amide group, e.g., —CONH₂. For example, in some embodiments, X⁵ is a residue of Asn. In some embodiments, X⁵ is a residue of Gln.

[0741] In some embodiments, X⁵ comprises a side chain which is hydrophobic, is aliphatic, is aromatic, etc.

[0742] In some embodiments, X⁵ is a residue of Asp, Hse, Asn, Glu, tetz, 3Thi, hPhe, 2pyrA, Ala, [MeSO2]Dap, [Tf]Dap, Ser, Gln, Leu, Dab, [MeSO2]Dab, nLeu, His, 3pyrA, 4pyrA, [NHiPr]AsnR, [NHEt]AsnR, [NHnPr]AsnR, [NHCyPr]AsnR, [NHCyBu]AsnR, [NHMe]AsnR, Phe, isoAsp, isoDAsp, RbGlu, and SbGlu. In some embodiments, X⁵ is selected from Asp, Asn, Gln, Glu, Hse, and Ser.

[0743] In some embodiments, X⁵ is or comprises a residue of an amino acid or a moiety selected from Table A-IV.

[0744] In some embodiments, X⁵ is a residue of [Et]AspE, [EtSSEt]AspE, [EtSSHex]AspE, [EtSSPh]AspE, [EtSSpy]AspE, [Me]AspE, AspSH, bMe2Asp, [MeSO2]Dab, [MeSO2]Dap, [NHCyBu]AsnR, [NHCyPr]AsnR, [NHEt]AsnR, [NHiPr]AsnR, [NHMe]AsnR, [NHnPr]AsnR, [Tf]Dap, 2pyrA, 3pyrA, 3Thi, 4pyrA, Ala, Arg, Asn, Asp, B5, BztA, Dab, Gln, Glu, His, hPhe, Hse, isoAsp, isoDAsp, Leu, nLeu, Npg, RbGlu, SbGlu, Ser, tetz, or Thr.

[0745] In some embodiments, X⁵ is a residue of [Et]AspE, [EtSSEt]AspE, [EtSSHex]AspE, [EtSSPh]AspE, [EtSSpy]AspE, [Me]AspE, AspSH, or bMe2Asp.

[0746] In some embodiments, X⁵ is a residue of [MeSO2]Dab, [MeSO2]Dap, [NHCyBu]AsnR, [NHCyPr]AsnR, [NHEt]AsnR, [NHiPr]AsnR, [NHMe]AsnR, [NHnPr]AsnR, [Tf]Dap, 2pyrA, 3pyrA, 3Thi, 4pyrA, Ala, Arg, Asn, Asp, B5, BztA, Dab, Gln, Glu, His, hPhe, Hse, isoAsp, isoDAsp, Leu, nLeu, Npg, RbGlu, SbGlu, Ser, tetz, or Thr.

[0747] Various types of amino acid residues can be used for X⁶, e.g., a residue of an amino acid of formula A-I, A-II, A-III, A-IV, A-V, A-VI, etc. or a salt thereof in accordance with the present disclosure. In some embodiments, X⁶ is a residue of an amino acid of formula A-I, A-II, A-III, A-IV, A-V, A-VI, etc. or a salt thereof. In some embodiments, X⁶ is —N(R^{a1})-L^{a1}-C(R^{a2})(R^{a3})-L^{a2}-C(O)—, wherein each variable is independently as described herein. In some embodiments, X⁶ is —N(R^{a1})—C(R^{a2})(R^{a3})—C(O)—, wherein each variable is independently as described herein. In some embodiments, X⁶ is —N(R^{a1})—C(R^{a2})H—C(O)—, wherein each variable is independently as described herein. In some embodiments, X⁶ is a residue of an amino acid of formula A-IV or a salt thereof. In some embodiments, X⁶ is a residue of an amino acid of formula PA, PA-a, PA-b, PA-c, or a salt thereof. In some embodiments, R^{PA} is —H and R^{PS} and R^{PC} are —OH. In some embodiments, R^{a1} is —H. In some embodiments, R^{a3} is —H.

[0748] In some embodiments, X⁶ is a residue of amino acid that comprises an acidic or polar group as described herein. In some embodiments, X⁶ is a residue of amino acid whose side chain comprises an acidic group, e.g., a —COOH group or a salt form thereof (e.g., a compound of formula A-IV, etc.) as described herein.

[0749] In some embodiments, X⁶ is a residue of an amino acid having the structure of formula A-IV or a salt thereof. In some embodiments, X⁶ is a residue of amino acid having the structure of formula PA, PA-a, PA-b, PA-c, etc. In some embodiments, R^{PA} is —H and R^{PS} and R^{PC} are —OH. In some embodiments, X⁶ is —N(R^{a1})-L^{a1}-C (-L^{a}-COOH)(R^{a3})-L^{a2}-C(O)—. In some embodiments, X⁶ is —NH-L^{a1}-C(-L^{a}-COOH)(R^{a3})-L^{a2}-C(O)—. In some embodiments, X⁶ is —NH—CH(-L^{a}-COOH)—C(O)—.

[0750] As described herein, L^{a} is L as described herein. In some embodiments, L is an optionally substituted bivalent linear or branched C₁₋₁₀ hydrocarbon chain wherein one or more methylene units of L are independently replaced with —C(O)—, —N(R′)—, -Cy- or —O—. In some embodiments, L is an optionally substituted bivalent linear C₁₋₁₀ hydrocarbon chain wherein one or more methylene units of L are independently replaced with —C(O)—, —N(R′)—, -Cy- or —O—. In some embodiments, L is an optionally substituted bivalent linear or branched C₁₋₁₀ hydrocarbon chain. In some embodiments, L is an optionally substituted bivalent linear C₁₋₁₀ hydrocarbon chain. In some embodiments, L is a bivalent linear or branched C₁₋₁₀ hydrocarbon chain. In some embodiments, L is a bivalent linear C₁₋₁₀ hydrocarbon chain. In some embodiments, L is optionally substituted —(CH₂)ₙ— wherein n is 1-10. In some embodiments, L is —(CH₂)ₙ—. In some embodiments, L is —CH₂—. In some embodiments, L is —(CH₂)₂—. In some embodiments, L is —(CH₂)₃—. In some embodiments, L is —(CH₂)₄—. In some embodiments, a methylene unit is replaced with -Cy-. In some embodiments, L is —CH₂-Cy-CH₂—. In some embodiments, L is —CH₂-Cy-. In some embodiments, L is —(CH₂)₄-Cy-CH₂—C(CH₃)₂—. In some embodiments, -Cy- is optionally substituted phenylene. In some embodiments, -Cy- is phenylene. In some embodiments, -Cy- is substituted phenylene. In some embodiments, -Cy- is mono-substituted phenylene. In some embodiments, a substituent is —F. In some embodiments, a substituent is optionally substituted C₁₋₆ alkyl. In some embodiments, a substituent is —CF₃. In some embodiments, a substituent is —OH. In some embodiments, phenylene is 1,2-phenylene. In some embodiments, phenylene is 1,3-phenylene. In some embodiments, phenylene is 1,4-phenylene. In some embodiments, a substituent is ortho to the carbon atom closed to —COOH. In some embodiments, it is meta. In some embodiments, it is para. In some embodiments, -Cy- is 1,3-phenylene (e.g., in 3COOHF). In some embodiments, -Cy- is an optionally substituted bivalent 5-10 membered heteroaryl group having 1-5 heteroatoms. In some embodiments, -Cy- is an optionally substituted bivalent 5-membered heteroaryl group having 1-4 heteroatoms. In some embodiments, -Cy- is an optionally substituted bivalent 6-membered heteroaryl group having 1-4 heteroatoms. In some embodiments, L is bonded to a backbone atom, e.g., an alpha carbon atom, at —CH₂—. In some embodiments, a methylene unit is replaced with —N(R′)— wherein R′ is as described herein. In some embodiments, L is —CH₂—N(R′)—CH₂— wherein R′ is as described herein. In some embodiments, R′ is R as described herein. In some embodiments, R is optionally substituted C₁₋₆ alkyl. In some embodiments, R is —CH₂CF₃.

[0751] In some embodiments, X⁶ is a residue of an amino acid of formula PA, PA-a, PA-b, PA-c, or a salt thereof, wherein R^{PA} is —H and R^{PS} and R^{PC} are —OH.

[0752] In some embodiments, X⁶ is a residue of TfeGA, 2COOHF, 3COOHF, Asp, Glu, RbGlu, SbGlu, NMeD, and isoDAsp. In some embodiments, X⁶ is a residue of TfeGA, 2COOHF, 3COOHF, Asp, Glu, RbGlu, SbGlu, and isoDAsp. In some embodiments, X⁶ is a residue of TfeGA. In some embodiments, X⁶ is a residue of 2COOHF. In some embodiments, X⁶ is a residue of 3COOHF. In some embodiments, X⁶ is a residue of Asp. In some embodiments, X⁶ is a residue of Glu. In some embodiments, X⁶ is a residue of EtGA. In some embodiments, X⁶ is a residue of 4COOHF. In some embodiments, X⁶ is a residue of Aad. In some embodiments, X⁶ is a residue of DGlu. In some embodiments, X⁶ is a residue of [iPr]GA. In some embodiments, X⁶ is a residue of [Pfbn]GA. In some embodiments, X⁶ is a residue of [Tfb]GA. In some embodiments, X⁶ is a residue of [Bn]GA. In some embodiments, X⁶ is a residue of lAcAw.

[0753] In some embodiments, X⁶ is a residue of amino acid whose side chain comprises a polar group as described herein. In some embodiments, X⁶ is a residue of amino acid whose side chain comprises —OH. For example, in some embodiments, X⁶ is a residue of Hse. In some embodiments, X⁶ is a residue of Ser. In some embodiments, X⁶ is a residue of Thr. In some embodiments, X⁶ is a residue of amino acid whose side chain comprises an amide group, e.g., —CONH₂. For example, in some embodiments, X⁶ is a residue of Asn. In some embodiments, X⁶ is a residue of Gln. In some embodiments, X⁶ is a residue of Cit.

[0754] In some embodiments, X⁶ is a hydrophobic amino acid residue as described herein. In some embodiments, X⁶ comprises a side chain which is hydrophobic, is aliphatic, comprises an optionally substituted aromatic group, comprises a basic group, etc.

[0755] As those skilled in the art reading the present disclosure will readily appreciate, amino acid residues of certain properties, structures, etc. described for one position may also be utilized at other positions where amino acid residues of the same properties, structures, etc. can be utilized. For example, when hydrophobic amino acid residues can be utilized at both positions X³ and X⁶, hydrophobic amino acid residues described for X³ can be utilized for X⁶ and vice versa. Similarly, when acidic amino acid residues can be utilized at positions X², X⁵ and X⁶, acidic amino acid residues described for one of them may be utilized at the other two positions as well.

[0756] In some embodiments, X⁶ comprises a side chain comprising an optionally substituted aromatic group as described herein.

[0757] In some embodiments, X⁶ is or comprises a residue of an amino acid or a moiety selected from Table A-IV.

[0758] In some embodiments, X⁶ is a residue of Asp, Glu, TfeGA, Thr, EtGA, Asn, 3COOHF, HIs, Gln, 2NapA, 4COOHF, nLeu, Leu, Cit, Aad, Cha, hLeu, hPhe, Ala, 3PyrA, Bip, Tyr, aMeDF, Phe, 1NapA, DaMeL, 3F3MeF, 4F3MeF, tetz, Arg, 2COOHF, DGlu, BztA, Trp, 6F1NapA, 3FF, 4FF, 34FF, 2PyrA, 4PyrA, hTyr, Qui, DipA, 4AmPhe, 2Thi, 1meH, [iPr]GA, [Pfbn]GA, [Tfb]GA, [Bn]GA, Lys, [Tfp]Dap, 1AcAW, Ser, Val, and [MeSO2]Dap.

[0759] In some embodiments, X⁶ is a residue of [2COOH4NH2Ph]Dap, [2COOH4NO2Ph]Cys, [2COOH4NO2Ph]Dap, [2COOHPh]TriAzDab, [2COOHPh]TriAzDap, [2Nic]Dap, [3COOH4NO2Ph]Dap, [4AcMePip]GA, [4AcMePip]GAbu, [4CF3PhAc]GA, [4CF3PhAc]GAbu, [Ac]GA, [Ac]GAbu, [Bn]GAbu, [CCpCO2H]TriAzDap, [CF3CO]GA, [CH₂CChCO2H]TriAzDap, [CH₂CCpCO2H]TriAzDap, [CH₂CH₂CO2H]TriAzDab, [CH₂CH₂CO2H]TriAzDap, [CH₂CMe2CO2H]TriAzDab, [CH₂CMe2CO2H]TriAzDap, [CH₂CO2H]GAbu, [CH₂CO2H]TriAzDab, [CH₂CO2H]TriAzDap, [CMe2CO2H]TriAzDab, [CMe2CO2H]TriAzDap, [Et]AspE, [Et]GA, [Et]GAbu, [Et]GluE, [EtSSEt]AspE, [EtSSEt]GluE, [EtSSHex]AspE, [EtSSPh]AspE, [EtSSPh]GluE, [EtSSpy]GluE, [Me]AspE, [Me]GA, [Me]GluE, [MeMorphBz]GA, [MeMorphBz]GAbu, [MePipAc]GA, [MePipAc]GAbu, [MorphAc]GA, [MorphAc]GAbu, [MorphEt]GAbu, [NdiMeButC]GA, [NdiMeButC]GAbu, [Pfb]GA, [Pfbn]GAbu, [PfBz]GA, [PfBz]GAbu, [PfPhAc]GA, [PfPhAc]GAbu, [Pic]GA, [Pic]GAbu, [sBu]GA, [Tfb]GAbu, [Tfp]GA, [Tfp]GAbu, 3TzF, 4F3COOHF, 4TzF, 5F3Me3COOHF, 5iPr3COOHF, AspSH, GAbu, GluSH, R2COOPipA, R3COOPipA, S2COOPipA, S3COOPipA, [Bn]GA, [iPr]GA, [Me2NPr]GA, [Me2NPr]GAbu, [MeSO2]Dap, [Pfbn]GA, [Tfb]GA, [Tfp]Dap, 1AcAW, 1meH, 1NapA, 2COOHF, 2NapA, 2PyrA, 2Thi, 34FF, 3cbmf, 3COOHF, 3F3MeF, 3FF, 3PyrA, 3thi, 4AmPhe, 4COOHF, 4F3MeF, 4FF, 4PyrA, 6F1NapA, Aad, Ala, aMeDF, Arg, Asn, Asp, B5, Bip, BztA, Cha, Cit, DaMeL, DGlu, DipA, EtGA, GA, Gln, Glu, His, hLeu, hPhe, Hse, hTyr, Leu, Lys, nLeu, Npg, Pff, Phe, Qui, Ser, tetz, TfeGA, Thr, Trp, Tyr, or Val.

[0760] In some embodiments, X⁶ is a residue of [2COOH4NH2Ph]Dap, [2COOH4NO2Ph]Cys, [2COOH4NO2Ph]Dap, [2COOHPh]TriAzDab, [2COOHPh]TriAzDap, [2Nic]Dap, [3COOH4NO2Ph]Dap, [4AcMePip]GA, [4AcMePip]GAbu, [4CF3PhAc]GA, [4CF3PhAc]GAbu, [Ac]GA, [Ac]GAbu, [Bn]GAbu, [CCpCO2H]TriAzDap, [CF3CO]GA, [CH₂CChCO2H]TriAzDap, [CH₂CCpCO2H]TriAzDap, [CH₂CH₂CO2H]TriAzDab, [CH₂CH₂CO2H]TriAzDap, [CH₂CMe2CO2H]TriAzDab, [CH₂CMe2CO2H]TriAzDap, [CH₂CO2H]GAbu, [CH₂CO2H]TriAzDab, [CH₂CO2H]TriAzDap, [CMe2CO2H]TriAzDab, [CMe2CO2H]TriAzDap, [Et]AspE, [Et]GA, [Et]GAbu, [Et]GluE, [EtSSEt]AspE, [EtSSEt]GluE, [EtSSHex]AspE, [EtSSPh]AspE, [EtSSPh]GluE, [EtSSpy]GluE, [Me]AspE, [Me]GA, [Me]GluE, [MeMorphBz]GA, [MeMorphBz]GAbu, [MePipAc]GA, [MePipAc]GAbu, [MorphAc]GA, [MorphAc]GAbu, [MorphEt]GAbu, [NdiMeButC]GA, [NdiMeButC]GAbu, [Pfb]GA, [Pfbn]GAbu, [PfBz]GA, [PfBz]GAbu, [PfPhAc]GA, [PfPhAc]GAbu, [Pic]GA, [Pic]GAbu, [sBu]GA, [Tfb]GAbu, [Tfp]GA, [Tfp]GAbu, 3TzF, 4F3COOHF, 4TzF, 5F3Me3COOHF, 5iPr3COOHF, AspSH, GAbu, GluSH, R2COOPipA, R3COOPipA, S2COOPipA, or S3COOPipA.

[0761] In some embodiments, X⁶ is a residue of [Bn]GA, [iPr]GA, [Me2NPr]GA, [Me2NPr]GAbu, [MeSO2]Dap, [Pfbn]GA, [Tfb]GA, [Tfp]Dap, 1AcAW, 1meH, 1NapA, 2COOHF, 2NapA, 2PyrA, 2Thi, 34FF, 3cbmf, 3COOHF, 3F3MeF, 3FF, 3PyrA, 3thi, 4AmPhe, 4COOHF, 4F3MeF, 4FF, 4PyrA, 6F1NapA, Aad, Ala, aMeDF, Arg, Asn, Asp, B5, Bip, BztA, Cha, Cit, DaMeL, DGlu, DipA, EtGA, GA, Gln, Glu, His, hLeu, hPhe, Hse, hTyr, Leu, Lys, nLeu, Npg, Pff, Phe, Qui, Ser, tetz, TfeGA, Thr, Trp, Tyr, or Val.

[0762] Various types of amino acid residues can be used for X⁷, e.g., a residue of an amino acid of formula A-I, A-II, A-III, A-IV, A-V, A-VI, etc. or a salt thereof in accordance with the present disclosure. In some embodiments, X⁷ is —N(R^{a1})-L^{a1}-C(R^{a2})(R^{a3})-L^{a2}-C(O)—, wherein each variable is independently as described herein. In some embodiments, X⁷ is —N(R^{a1})—C(R^{a2})(R^{a3})—C(O)—, wherein each variable is independently as described herein. In some embodiments, X⁷ is —N(R^{a1})—C(R^{a2})H—C(O)—, wherein each variable is independently as described herein. In some embodiments, R^{a1} is —H. In some embodiments, R^{a3} is —H.

[0763] In some embodiments, R^{a2} is R, wherein R is C₁₋₁₀ aliphatic. In some embodiments, R^{a3} is R, wherein R is C₁₋₁₀ aliphatic. In some embodiments, each of R^{a2} and R^{a3} is independently R as described herein. In some embodiments, R^{a2} and R^{a3} are the same. In some embodiments, R is C₁₋₁₀ alkyl. In some embodiments, R is methyl.

[0764] In some embodiments, X⁷ is a residue of an amino acid whose side chain is hydrophobic. In some embodiments, X⁷ is a hydrophobic amino acid residue described herein, e.g., those described for X³. In some embodiments, X⁷ is a residue of an amino acid whose side chain is optionally substituted C₁₋₁₀ alkyl. In some embodiments, X⁷ is a residue of an amino acid whose side chain is C₁₋₁₀ alkyl. In some embodiments, X⁷ is a residue of an amino acid whose side chain is C₁₋₁₀ alkyl optionally substituted with one or more non-polar and non-charged groups. In some embodiments, X⁷ comprises a side chain comprising a cycloaliphatic group (e.g., a 3-, 4-, 5-, or 6-membered cycloalkyl group).

[0765] Various types of amino acid residues can be utilized for X⁷. In some embodiments, X⁷ comprises a polar side chain. In some embodiments, X⁷ comprises a non-polar side chain. In some embodiments, X⁷ comprises a hydrophobic side chain. In some embodiments, X⁷ comprises an aliphatic side chain. In some embodiments, X⁷ comprises an alkyl side chain. In some embodiments, X⁷ comprises a side chain comprising an optionally substituted aromatic group. In some embodiments, X⁷ comprises a side chain comprising an acidic group, e.g., —COOH. In some embodiments, X⁷ comprises a side chain comprising a basic group, e.g., —N(R)₂. In some embodiments, X⁷ comprises a detectable moiety such as a fluorescent moiety.

[0766] In some embodiments, X⁷ is a residue of amino acid whose side chain comprises a polar group. Various polar amino acid residues described herein may be utilized for X⁷. In some embodiments, X⁷ is a residue of amino acid whose side chain comprises —OH. For example, in some embodiments, X⁷ is a residue of Ser. In some embodiments, X⁷ is a residue of amino acid whose side chain comprises a basic group. In some embodiments, X⁷ is a residue of amino acid whose side chain comprises an amino group, e.g., Lys. In some embodiments, X⁷ comprises a side chain comprising an optionally substituted aromatic group, e.g., Phe.

[0767] In some embodiments, X⁷ is selected from Ala, Leu, iPrLys, Phe, Ser, Aib, Gln, nLeu, Trp, Ile, and Lys, and a substituted or labeled lysine. In some embodiments, X⁷ is selected from Ala, Leu, iPrLys, [AzAc]Lys, Phe, Ser, [FAM6Ppg][p1 TB]Lys, Aib, Gln, nLeu, Trp, [FAM6Ppg][1TriAc]Lys, Ile, and Lys. In some embodiments, a lysine is labeled with a detectable moiety (either directly or indirectly detectable). In some embodiments, X⁷ is selected from Ala, Leu, iPrLys, Phe, Ser, Aib, Gln, nLeu, Trp, Ile, and Lys. In some embodiments, X⁷ is Ala.

[0768] In some embodiments, X⁷ is or comprises a residue of an amino acid or a moiety of Table A-IV.

[0769] In some embodiments, X⁷ is a residue of [20xoPpz]GlnR, [3Py]4SF, [4Pippip]GlnR, [Ac]Lys, [AcPpz]GlnR, [bismethoxyethylamine]GlnR, [CF3CO]Lys, [CH₂NMe2]4SEF, [EtSO2Ppz]GlnR, [isoindoline]GlnR, [Me2diaminobutane]GlnR, [Me2Npr]Lys, [Me2NPrPip]GlnR, [MeSO2]Lys, [Morph]GlnR, [NHEt]GlnR, [NMe2]GlnR, [Phc]Lys, [TfePpz]GlnR, Cpg, CyLeu, F2PipNva, hhLeu, Me2Asn, Me2Gln, MeGln, MePpzAsn, Met2O, MorphAsn, MorphNva, [MorphAc]Lys, [mPEG4]Lys, 3COOHF, Aib, Ala, Asn, Asp, Gln, Gly, His, Hse, Ile, iPrLys, Leu, Lys, nLeu, Phe, R5, Ser, Thr, or Trp.

[0770] In some embodiments, X⁷ is a residue of [20xoPpz]GlnR, [3Py]4SF, [4Pippip]GlnR, [Ac]Lys, [AcPpz]GlnR, [bismethoxyethylamine]GlnR, [CF3CO]Lys, [CH₂NMe2]4SEF, [EtSO2Ppz]GlnR, [isoindoline]GlnR, [Me2diaminobutane]GlnR, [Me2Npr]Lys, [Me2NPrPip]GlnR, [MeSO2]Lys, [Morph]GlnR, [NHEt]GlnR, [NMe2]GlnR, [Phc]Lys, [TfePpz]GlnR, Cpg, CyLeu, F2PipNva, hhLeu, Me2Asn, Me2Gln, MeGln, MePpzAsn, Met2O, MorphAsn, or MorphNva.

[0771] In some embodiments, X⁷ is a residue of [MorphAc]Lys, [mPEG4]Lys, 3COOHF, Aib, Ala, Asn, Asp, Gln, Gly, His, Hse, Ile, iPrLys, Leu, Lys, nLeu, Phe, R5, Ser, Thr, or Trp.

[0772] Various types of amino acid residues can be used for X⁸, e.g., a residue of an amino acid of formula A-I, A-II, A-III, A-IV, A-V, A-VI, etc. or a salt thereof in accordance with the present disclosure. In some embodiments, X⁸ is —N(R^{a1})-L^{a1}-C(R^{a2})(R^{a3})-L^{a2}-C(O)—, wherein each variable is independently as described herein. In some embodiments, X⁸ is —N(R^{a1})—C(R^{a2})(R^{a3})—C(O)—, wherein each variable is independently as described herein. In some embodiments, X⁸ is —N(R^{a1})—C(R^{a2})H—C(O)—, wherein each variable is independently as described herein. In some embodiments, R^{a1} is —H. In some embodiments, R^{a3} is —H.

[0773] In some embodiments, X⁸ comprises a polar side chain as described herein. In some embodiments, X⁸ comprises a non-polar side chain. In some embodiments, X⁸ comprises a hydrophobic side chain. In some embodiments, X⁸ is a hydrophobic amino acid residue as described herein, e.g., those described for X³. In some embodiments, X⁸ comprises an aliphatic side chain. In some embodiments, X⁸ comprises an alkyl side chain. In some embodiments, X⁸ comprises a side chain comprising an optionally substituted aromatic group. In some embodiments, X⁸ comprises a side chain comprising an acidic group, e.g., —COOH, as described herein. In some embodiments, X⁸ comprises a side chain comprising a basic group, e.g., —N(R)₂ as described herein. In some embodiments, X⁸ comprises a detectable moiety such as a fluorescent moiety.

[0774] In some embodiments, Xx is selected from Ala, Leu, Phe, Ser, Aib, Asp, Glu, Aad, Trp, nLeu, Gln, Ile, Lys, iPrLys, and a substituted or labeled lysine. In some embodiments, a lysine is labeled with a detectable moiety (either directly or indirectly detectable). In some embodiments, X⁸ is selected from Ala, Leu, Phe, Ser, Aib, Asp, Glu, Aad, Trp, nLeu, [mPEG2]Lys, [AzAc]Lys, Gln, [FAM6Ppg][1TriAc]Lys, [35CF3PhPr]Lys, [1NapPr]Lys, [22PhPr]Lys, [MorphAc]Lys, [MePipAc]Lys, [MeBipipAc]Lys, [4MePipBz]Lys, [MeMorphBz]Lys, [Me2NCBz]Lys, [mPEG4]Lys, [mPEG6]Lys, [mPEG8]Lys, [Bua]Lys, [Oct]Lys, [AdamantC]Lys, [Me3AdamantC]Lys, [AdamantPro]Lys, Ile, Lys, and iPrLys. In some embodiments, XX⁸ is Ala.

[0775] In some embodiments, XX⁸ is or comprises a residue of an amino acid or a moiety selected from Table A-IV.

[0776] In some embodiments, XX⁸ is a residue of [lithocholate]-Lys, [lithocholate-PEG2]-Lys, [Me2NCBz]Lys, [Me3AdamantC-PEG2]-Lys, F2PipAbu, F2PipNva, MePpzAbu, MePpzAsn, MePpzNva, MorphAbu, MorphAsn, MorphNva, dAla, [1NapPr]Lys, [22PhPr]Lys, [35CF3PhPr]Lys, [4MePipBz]Lys, [AdamantC]Lys, [AdamantPro]Lys, [Bua]Lys, [Me3AdamantC]Lys, [Me3AdamantC]-Lys, [MeBipipAc]Lys, [MeMorphBz]Lys, [MePipAc]Lys, [MorphAc]Lys, [mPEG2]Lys, [mPEG4]Lys, [mPEG6]Lys, [mPEG8]Lys, [Oct]Lys, 3COOHF, Aad, Aib, Ala, Asp, Gln, Glu, Gly, Ile, iPrLys, Leu, Lys, nLeu, Phe, Ser, or Trp.

[0777] In some embodiments, XX⁸ is a residue of [lithocholate]-Lys, [lithocholate-PEG2]-Lys, [Me2NCBz]Lys, [Me3AdamantC-PEG2]-Lys, F2PipAbu, F2PipNva, MePpzAbu, MePpzAsn, MePpzNva, MorphAbu, MorphAsn, MorphNva, or dAla.

[0778] In some embodiments, XX⁸ is a residue of [1NapPr]Lys, [22PhPr]Lys, [35CF3PhPr]Lys, [4MePipBz]Lys, [AdamantC]Lys, [AdamantPro]Lys, [Bua]Lys, [Me3AdamantC]Lys, [Me3AdamantC]-Lys, [MeBipipAc]Lys, [MeMorphBz]Lys, [MePipAc]Lys, [MorphAc]Lys, [mPEG2]Lys, [mPEG4]Lys, [mPEG6]Lys, [mPEG8]Lys, [Oct]Lys, 3COOHF, Aad, Aib, Ala, Asp, Gln, Glu, Gly, Ile, iPrLys, Leu, Lys, nLeu, Phe, Ser, or Trp.

[0779] Various types of amino acid residues can be used for X⁹, e.g., a residue of an amino acid of formula A-I, A-II, A-III, A-IV, A-V, A-VI, etc. or a salt thereof in accordance with the present disclosure. In some embodiments, X⁹ is —N(R^{a1})-L^{a1}-C(R^{a2})(R^{a3})-L^{a2}-C(O)—, wherein each variable is independently as described herein. In some embodiments, X⁹ is —N(R^{a1})—C(R^{a2})(R^{a3})—C(O)—, wherein each variable is independently as described herein. In some embodiments, X⁹ is —N(R^{a1})—C(R^{a2})H—C(O)—, wherein each variable is independently as described herein. In some embodiments, R^{a1} is —H. In some embodiments, R^{a3} is —H.

[0780] In some embodiments, X⁹ comprises a side chain which is or comprises an optionally substituted aromatic group. In some embodiments, X⁹ is an aromatic amino acid residue as described herein. In some embodiments, an aromatic group is optionally substituted 5-membered heteroaryl having 1-3 heteroatoms. In some embodiments, an aromatic group is optionally substituted 5-membered heteroaryl having 1-3 nitrogen atoms. In some embodiments, an aromatic group is optionally substituted 5-membered heteroaryl having one sulfur atom. In some embodiments, an aromatic group is optionally substituted phenyl. In some embodiments, X⁹ comprises a side chain which is or comprises an optionally substituted aromatic group, wherein each substituent of the aromatic group is independently selected from halogen, —OR, —R, —C(O)OH, or —CN, wherein each R is independently hydrogen or C₁₋₄ alkyl or haloalkyl. In some embodiments, an aromatic group is phenyl. In some embodiments, an aromatic group is optionally substituted 8-10 membered bicyclic aryl or heteroaryl having 1-5 heteroatoms. In some embodiments, X⁹ comprises a side chain which is or comprises an optionally substituted aromatic group, wherein each substituent of the aromatic group is independently halogen. In some embodiments, X⁹ comprises a side chain which is or comprises two optionally substituted aromatic groups. In some embodiments, X⁹ comprises a side chain which is or comprises an optionally substituted aromatic group, wherein each substituent of the aromatic group is independently selected from halogen or —OH. In some embodiments, an aromatic group is phenyl. In some embodiments, an aromatic group is optionally substituted 8-10 membered bicyclic aryl or heteroaryl having 0-5 heteroatoms. In some embodiments, an aromatic group is optionally substituted 9-10 membered bicyclic aryl or heteroaryl having one heteroatom. In some embodiments, X⁹ is a residue of an amino acid of formula A-I or a salt thereof. In some embodiments, an amino acid residue has the structure of —NH—C(R^{a2})(R^{a3})—C(O)— or a salt thereof. In some embodiments, an amino acid residue has the structure of —NH—CH(R^{a3})—C)O)— or a salt thereof. As described herein, R^{a3} is -L^{a}-R′ wherein each variable is independently as described herein. In some embodiments, R′ is R as described herein. In some embodiments, R is an optionally substituted group selected from phenyl, 10-membered bicyclic aryl, 5−6 membered heteroaryl having 1-4 heteroatoms, and 9-10 membered bicyclic heteroaryl having 1-5 heteroatoms. In some embodiments, each substituent is independently halogen or —OH or C₁₋₆ haloaliphatic. In some embodiments, each substituent is independently halogen or —OH. In some embodiments, R is optionally substituted phenyl. In some embodiments, R is phenyl. In some embodiments, R is optionally substituted aryl. In some embodiments, R is aryl. In some embodiments, R is optionally substituted 5-membered heteroaryl having 1-4 heteroatoms. In some embodiments, R is optionally substituted 5-membered heteroaryl having 1 heteroatom. In some embodiments, optionally substituted R is 6-membered heteroaryl having 1-4 heteroatoms. In some embodiments, optionally substituted R is 6-membered heteroaryl having 1 heteroatom. In some embodiments, R is optionally substituted 9-membered heteroaryl having 1-5 heteroatoms. In some embodiments, R is optionally substituted 9-membered heteroaryl having 1 heteroatom. In some embodiments, R is optionally substituted 10-membered heteroaryl having 1-5 heteroatoms. In some embodiments, R is optionally substituted 10-membered heteroaryl having 1 heteroatom. In some embodiments, a heteroatom is nitrogen. In some embodiments, a heteroatom is oxygen. In some embodiments, a heteroatom is sulfur. As described herein, L^{a} is L. In some embodiments, L is a covalent bond. In some embodiments, L is an optionally substituted bivalent linear or branched C₁₋₁₀ hydrocarbon chain. In some embodiments, L is an optionally substituted bivalent linear C₁₋₁₀ hydrocarbon chain. In some embodiments, L is a bivalent linear or branched C₁₋₁₀ hydrocarbon chain. In some embodiments, L is a bivalent linear C₁₋₁₀ hydrocarbon chain. In some embodiments, L is optionally substituted —(CH₂)ₙ—, wherein n is 1-10. In some embodiments, L is —(CH₂)ₙ—, wherein n is 1-10. In some embodiments, L is —CH₂—. In some embodiments, L is —(CH₂)₂—. In some embodiments, Lis —(CH₂)₃—. In some embodiments, L is —(CH₂)₄—. In some embodiments, L is an optionally substituted bivalent linear or branched C₁₋₁₀ hydrocarbon chain wherein one or more methylene units of L are independently replaced with —C(R′)₂—, —C(O)—, —N(R′)—, -Cy- or —O—. In some embodiments, L is an optionally substituted bivalent linear C₁₋₁₀ hydrocarbon chain wherein one or more methylene units of L are independently replaced with —C(R′)₂—, —C(O)—, —N(R′)—, -Cy- or —O—.

[0781] In some embodiments, X⁹ is a residue of an amino acid having the structure of formula A-I, wherein R^{a2} is -L^{a}-R′, and R′ is an optionally substituted aromatic group. In some embodiments, L^{a} is optionally substituted CH₂. In some embodiments, L^{a} is —CH₂—. In some embodiments, X⁹ comprises a side chain which is or comprises an optionally substituted aromatic group, wherein each substituent of the aromatic group is independently selected from halogen, —OR, —R, —N(R)₂, —C(O)N(R)₂, or —CN, wherein each R is independently —H, C₁₋₄ alkyl or haloalkyl, or -Ph. In some embodiments, X⁹ comprises a side chain which is or comprises an optionally substituted aromatic group, wherein each substituent of the aromatic group is independently selected from halogen, —OR, —R, —NH₂, —C(O)NH₂, -Ph, or —CN, wherein each R is independently C₁₋₄ alkyl or haloalkyl. In some embodiments, X⁹ comprises a side chain which is or comprises an optionally substituted aromatic group, wherein each substituent of the aromatic group is independently selected from halogen, —OR, —R, —NH₂, —C(O)NH₂, -Ph, or —CN, wherein each R is independently C₁₋₂ alkyl or haloalkyl. In some embodiments, X⁹ comprises a side chain which is or comprises an optionally substituted aromatic group, wherein each substituent of the aromatic group is independently selected from halogen, —OR, —R, NH₂, —C(O)NH₂, -Ph, or —CN, wherein each R is independently methyl optionally substituted with one or more halogen. In some embodiments, X⁹ comprises a side chain which is or comprises an optionally substituted aromatic group, wherein each substituent of the aromatic group is independently selected from —F, —OR, —CH₃, —NH₂, —C(O)NH₂, -Ph, or —CN, wherein each R is independently methyl optionally substituted with one or more —F. In some embodiments, X⁹ comprises a side chain which is or comprises an optionally substituted aromatic group, wherein each substituent of the aromatic group is independently selected from —F, —OR, —CH₃, —CF₃, —NH₂, —C(O)NH₂, -Ph, or —CN. In some embodiments, X⁹ comprises a side chain which is or comprises an optionally substituted aromatic group, wherein each substituent of the aromatic group is independently selected from halogen, —CH₃, —CF₃, or —CN. In some embodiments, X⁹ comprises a side chain which is or comprises an aromatic group optionally substituted at 2′-position. In some embodiments, X⁹ comprises a side chain which is or comprises an unsubstituted aromatic group. In some embodiments, an aromatic group is optionally substituted 5-membered heteroaryl having 1-3 heteroatoms. In some embodiments, an aromatic group is optionally substituted 5-membered heteroaryl having 1-3 nitrogen atoms. In some embodiments, an aromatic group is optionally substituted 5-membered heteroaryl having one oxygen atom. In some embodiments, an aromatic group is optionally substituted 5-membered heteroaryl having one sulfur atom. In some embodiments, an aromatic group is optionally substituted phenyl. In some embodiments, an aromatic group is optionally substituted 8-10 membered bicyclic aryl or heteroaryl having 1-5 heteroatoms. In some embodiments, X⁹ is selected from Phe, 3F3MeF, 2Thi, 3Thi, 4F3MeF, 30MeF, 3MeF, 2MeF, 2NapA, 345FF, 34FF, 3FF, His, 2FurA, 2PyrA, 4AmPhe, 4FF, 1meH, 23FF, 2FF, 35FF, 3CBMF, 3ClF, 3meH, 3PyrA, 4CBMF, 4ClF, 4Thz, BztA, hPhe, hTyr, MeTyr, 1NapA, 2CNF, 3CNF, 4CNF, 4MeF, Bip, DipA, and Phg. In some embodiments, X⁹ is Phe.

[0782] In some embodiments, X⁹ comprises a polar side chain. In some embodiments, X⁹ is a polar amino acid residue as described herein. In some embodiments, X⁹ comprises a non-polar side chain. In some embodiments, X⁹ comprises a hydrophobic side chain. In some embodiments, X⁹ is a hydrophobic amino acid residue as described herein. In some embodiments, X⁹ comprises an aliphatic side chain. In some embodiments, X⁹ comprises an alkyl side chain. In some embodiments, X⁹ comprises a side chain comprising a cycloaliphatic group (e.g., a 5- or 6-membered cycloalkyl group). In some embodiments, X⁹ comprises a side chain comprising an optionally substituted aromatic group. In some embodiments, X⁹ comprises a side chain comprising an acidic group, e.g., —COOH. In some embodiments, X⁹ is an acidic amino acid residue as described herein. In some embodiments, X⁹ comprises a side chain comprising a basic group, e.g., —N(R)₂. In some embodiments, X⁹ is a basic amino acid residue as described herein. In some embodiments, X⁹ is Gln. In some embodiments, X⁹ is Asp. In some embodiments, X⁹ is Cha. In some embodiments, X⁹ is CypA. In some embodiments, X⁹ is Ala. In some embodiments, X⁹ is nLeu. In some embodiments, X⁹ is Npg.

[0783] In some embodiments, X⁹ is or comprises a residue of an amino acid or a moiety selected from Table A-IV.

[0784] In some embodiments, X⁹ is a residue of [3Py]4SF, [CH2NMe2]4SEF, [CH2NMe2]TriAzDap, [CH2Ppz]TriAzDap, [MorphCH2]TriAzDap, [SO2MorphCH2]TriAzDap, 2NH2F, 3CH2NMe2F, 3CO2PhF, 3SO2F, 4BrF, Cba, 1meH, 1NapA, 23FF, 2cbmf, 2ClF, 2CNF, 2FF, 2FurA, 2MeF, 2NapA, 2PyrA, 2Thi, 345FF, 34FF, 35FF, 3CBMF, 3ClF, 3CNF, 3COOHF, 3F3MeF, 3FF, 3MeF, 3meH, 30MeF, 3PyrA, 3Thi, 4AmPhe, 4CBMF, 4ClF, 4CNF, 4F3MeF, 4FF, 4MeF, 4Thz, Ala, Asp, Bip, BztA, Cha, CypA, DipA, Gln, His, hPhe, hTyr, MeTyr, nLeu, Npg, Phe, Phg, Ser, or Tyr.

[0785] In some embodiments, X⁹ is a residue of [3Py]4SF, [CH2NMe2]4SEF, [CH2NMe2]TriAzDap, [CH2Ppz]TriAzDap, [MorphCH2]TriAzDap, [SO2MorphCH2]TriAzDap, 2NH2F, 3CH2NMe2F, 3CO2PhF, 3SO2F, 4BrF, or Cba.

[0786] In some embodiments, X⁹ is a residue of 1meH, 1NapA, 23FF, 2cbmf, 2ClF, 2CNF, 2FF, 2FurA, 2MeF, 2NapA, 2PyrA, 2Thi, 345FF, 34FF, 35FF, 3CBMF, 3ClF, 3CNF, 3COOHF, 3F3MeF, 3FF, 3MeF, 3meH, 30MeF, 3PyrA, 3Thi, 4AmPhe, 4CBMF, 4ClF, 4CNF, 4F3MeF, 4FF, 4MeF, 4Thz, Ala, Asp, Bip, BztA, Cha, CypA, DipA, Gln, His, hPhe, hTyr, MeTyr, nLeu, Npg, Phe, Phg, Ser, or Tyr.

[0787] Various types of amino acid residues can be used for X¹⁰, e.g., a residue of an amino acid of formula A-I, A-II, A-III, A-IV, A-V, A-VI, etc. or a salt thereof in accordance with the present disclosure. In some embodiments, X¹⁰ is —N(R^{a1})-L^{a1}-C(R^{a2})(R^{a3})-L^{a2}-C(O)—, wherein each variable is independently as described herein. In some embodiments, X¹⁰ is —N(R^{a1})—C(R^{a2})(R^{a3})—C(O)—, wherein each variable is independently as described herein. In some embodiments, X¹⁰ is —N(R^{a1})—C(R^{a2})H—C(O)—, wherein each variable is independently as described herein. In some embodiments, R^{a1} is —H. In some embodiments, R^{a3} is —H.

[0788] In some embodiments, X¹⁰ is a residue of an amino acid suitable for stapling as described herein. In some embodiments, X¹⁰ is a residue of an amino acid comprising a double bond, e.g., a terminal olefin, suitable for stapling. In some embodiments, X¹⁰ is a residue of an amino acid having the structure of A-II, A-III, etc. In some embodiments, X¹⁰ is a residue of RdN. In some embodiments, X¹⁰ is a residue of S8. In some embodiments, X¹⁰ is stapled. In some embodiments, X¹⁰ is stapled with X³.

[0789] In some embodiments, X¹⁰ is a residue of an amino acid having the structure of formula A-I, A-II, A-III, etc.

[0790] In some embodiments, X¹⁰ is a residue of an amino acid whose side chain is hydrophobic. In some embodiments, X¹⁰ is a residue of an amino acid whose side chain is an optionally substituted aliphatic group. In some embodiments, X¹⁰ is a residue of an amino acid whose side chain is optionally substituted C₁₋₁₀ alkyl. In some embodiments, X¹⁰ is a residue of an amino acid whose side chain is C₁₋₁₀ alkyl. In some embodiments, X¹⁰ is a residue of an amino acid whose side chain is C₁₋₁₀ alkyl optionally substituted with one or more non-polar and non-charged groups. In some embodiments, X¹⁰ is a residue of an amino acid whose side chain is C₁₋₁₀ alkyl optionally substituted with one or more substituents independently selected from halogen, —SR and —OR, where each R is independently C₁₋₄ alkyl. In some embodiments, X¹⁰ is a residue of an amino acid whose side chain is C₁₋₁₀ alkyl optionally substituted with one or more substituents independently selected from halogen, —SR and —OR, where each R is independently C₁₋₄ alkyl. In some embodiments, R is methyl. In some embodiments, X¹⁰ is a residue of Npg, Ala, Ile, Leu, Cha, Abu, hLeu, Val, F3CA, aIle, Nva, TOMe, S(Ome), nLeu, or HF2CA. In some embodiments, X¹⁰ is a residue of an amino acid whose side chain comprises an optionally substituted aromatic group. In some embodiments, X¹⁰ is a residue of an amino acid whose side chain comprises a hydrocarbon aromatic group. In some embodiments, X¹⁰ is a residue of NpG. Phe, 1NapA, or 2NapA. In some embodiments, X¹⁰ is a residue of Leu.

[0791] In some embodiments, X¹⁰ is a residue of amino acid whose side chain comprises a polar group as described herein. In some embodiments, X¹⁰ is a residue of amino acid whose side chain comprises —OH. For example, in some embodiments, X¹⁰ is a residue of Hse. In some embodiments, X¹⁰ is a residue of Ser. In some embodiments, X¹⁰ is a residue of Thr. In some embodiments, X¹⁰ is a residue of amino acid whose side chain comprises an amide group, e.g., —CONH₂. For example, in some embodiments, X¹⁰ is a residue of Asn. In some embodiments, X¹⁰ is a residue of Gln. In some embodiments, X¹⁰ is a residue of Cit.

[0792] In some embodiments, X¹⁰ is a residue of amino acid whose side chain comprises an optionally substituted aromatic group. In some embodiments, X¹⁰ is an aromatic amino acid residue as described herein. In some embodiments, an aromatic group is optionally substituted phenyl. In some embodiments, X¹⁰ is Phe.

[0793] In some embodiments, X¹⁰ is selected from Asn, Val, Gln, Leu, Thr, Ser, Phe, Ala, Hse, Cit, iPrLys, S7, S5, Cha, PyrS, S(Ome), [AzAc]Lys, nLeu, 2F3MeF, 3F3MeF, and 4F3MeF. In some embodiments, X¹⁰ is a residue of Asn, Val, Gln, Leu, Thr, Ser, Phe, Ala, Hse, Cit, iPrLys, S7, S5, Cha, PyrS, S(Ome), or [AzAc]Lys. In some embodiments, X¹⁰ is Leu, Thr or Hse. In some embodiments, X¹⁰ is Leu. In some embodiments, X¹⁰ is Thr. In some embodiments, X¹⁰ is Hse.

[0794] In some embodiments, X¹⁰ is or comprises a residue of an amino acid or a moiety selected from Table A-I, Table A-II, Table A-III and Table A-IV.

[0795] In some embodiments, X¹⁰ is a residue of [4MePpzPip]GlnR, [4Pippip]GlnR, [4PyPip]GlnR, [CH₂NMe2]TriAzDap, [CH₂Ppz]TriAzDap, [H4IAP]GlnR, [Me2NPrPip]GlnR, [Morph]GlnR, [MorphCH2]TriAzDap, [NHBn]GlnR, [Ppz]GlnR, [RDMAPyr]GlnR, [SO2MorphCH2]TriAzDap, [TfePpz]GlnR, 4BrF, AcLys, F2PipNva, Me2Asn, Me2Gln, MePpzAsn, MorphAsn, MorphGln, MorphNva, MeAsn, 2F3MeF, 3F3MeF, 4F3MeF, Abu, Ala, Arg, Asn, Cha, Cit, dSer, Gln, His, hLeu, Hse, iPrLys, Leu, Lys, nLeu, Npg, Phe, PyrS, PyrS2, R5, S(Ome), S5, S7, Ser, Thr, Trp, or Val.

[0796] In some embodiments, X¹⁰ is a residue of [4MePpzPip]GlnR, [4Pippip]GlnR, [4PyPip]GlnR, [CH₂NMe2]TriAzDap, [CH₂Ppz]TriAzDap, [H4IAP]GlnR, [Me2NPrPip]GlnR, [Morph]GlnR, [MorphCH2]TriAzDap, [NHBn]GlnR, [Ppz]GlnR, [RDMAPyr]GlnR, [SO2MorphCH2]TriAzDap, [TfePpz]GlnR, 4BrF, AcLys, F2PipNva, Me2Asn, Me2Gln, MePpzAsn, MorphAsn, MorphGln, MorphNva, or MeAsn.

[0797] In some embodiments, X¹⁰ is a residue of 2F3MeF, 3F3MeF, 4F3MeF, Abu, Ala, Arg, Asn, Cha, Cit, dSer, Gln, His, hLeu, Hse, iPrLys, Leu, Lys, nLeu, Npg, Phe, PyrS, PyrS2, R5, S(Ome), S5, S7, Ser, Thr, Trp, or Val.

[0798] Various types of amino acid residues can be used for X¹¹, e.g., a residue of an amino acid of formula A-I, A-II, A-III, A-IV, A-V, A-VI, etc. or a salt thereof in accordance with the present disclosure. In some embodiments, X¹¹ is —N(R^{a1})-L^{a1}-C(R^{a2})(R^{a3})-L^{a2}-C(O)—, wherein each variable is independently as described herein. In some embodiments, X¹¹ is —N(R^{a1})—C(R^{a2})(R^{a3})—C(O)—, wherein each variable is independently as described herein. In some embodiments, X¹¹ is —N(R^{a1})—C(R^{a2})H—C(O)—, wherein each variable is independently as described herein. In some embodiments, R^{a1} is —H. In some embodiments, R^{a3} is —H.

[0799] In some embodiments, X¹¹ is a residue of an amino acid suitable for stapling as described herein. In some embodiments, an amino acid residue suitable for stapling is —N(R^{a1})-L^{a1}-C(-L^{a}-R^{SP1})(R^{a3})-L^{a2}-C(O)— wherein each variable is independently as described herein. In some embodiments, it is —N(R^{a1})—C(-L^{a}-R^{SP1})(R^{a3})—C(O)— wherein each variable is independently as described herein. In some embodiments, in a pair of amino acid residues suitable for stapling, each amino acid residue is independently —N(R^{a1})-L^{a1}-C(-L^{a}-R^{SP1})(R^{a3})-L^{a2}-C(O)— or —N(R^{a1})—C(-L^{a}-R^{SP1})(R^{a3})—C(O)—, wherein each variable is independently as described herein. In some embodiments, R^{a1} is —H. In some embodiments, R^{a3} is —H. In some embodiments, both R^{a1} and R^{a3} are —H. In some embodiments, R^{SP1} comprises optionally substituted —CH═CH—. In some embodiments, R^{SP1} is or comprises optionally substituted —CH═CH₂. In some embodiments, R^{SP1} is —CH═CH₂.

[0800] In some embodiments, X¹¹ is a residue of an amino acid suitable for stapling. In some embodiments, X¹¹ is a residue of an amino acid, e.g., having the structure of formula A-I, A-II, A-III, A-IV, A-V, A-VI, etc., whose side chain comprise a functional group suitable for stapling, e.g., a double bond. In some embodiments, X¹¹ is a residue of an amino acid that comprises one and no more than one functional groups for stapling. In some embodiments, X¹¹ is a residue of an amino acid that comprises one and no more than one double bond for stapling. As in certain embodiments of X¹¹, in some embodiments, X¹¹ comprises a ring structure, and its amino group is part of a ring. In some embodiments, X¹¹ is an amino acid as described herein (e.g., of formula A-I, A-II, A-III, etc.), wherein R^{a1} and R^{a3} are taken together to form an optionally substituted ring, e.g., an optionally substituted 3-10 membered ring. In some embodiments, R^{a1} and R^{a3} are taken together with their intervening atoms to form an optionally substituted 3-10 membered saturated or partially saturated ring having, in addition to the intervening atoms, 0-5 heteroatoms.

[0801] In some embodiments, R^{a2} and R^{a3} are taken together to form an optionally substituted ring, e.g., an optionally substituted 3-10 membered ring. In some embodiments, R^{a2} and R^{a3} are taken together with their intervening atoms to form an optionally substituted 3-10 membered saturated or partially saturated ring having, in addition to the intervening atoms, 0-5 heteroatoms.

[0802] As described herein, in some embodiments, a formed ring, e.g., by R^{a1} and R^{a3} taken together with their intervening atoms, by R^{a2} and R^{a3} taken together with their intervening atoms, or by any other two suitable R taken together with their intervening atoms, either in X¹¹ or another moiety, is saturated. In some embodiments, a formed ring is monocyclic. In some embodiments, a formed ring has no heteroatoms in addition to the intervening atoms. In some embodiments, a formed ring has at least one heteroatom in addition to the intervening atoms. In some embodiments, a formed ring has at least one nitrogen in addition to the intervening atoms. In some embodiments, L^{a1} and L^{a2} are covalent bond. In some embodiments, a formed ring is unsubstituted. In some embodiments, a formed ring is substituted. In some embodiments, a substitute comprises a double bond which is suitable for metathesis with another double bond to form a staple. In some embodiments, a substituent has the structure of —C(O)—O—(CH₂)ₙ—Ch=CH₂, wherein n is 1, 2, 3, 4, 5, 6, 7, 8, 9, or 10. In some embodiments, a substituent bonds to a nitrogen ring atom (e.g., see PyrS, PyrsS1, PyrS2, PyrS3, etc.).

[0803] In some embodiments, L^{a} is —(CH₂)ₙ₁—N(R′)—C(O)—(CH₂)ₙ₂—, wherein each variable is independently as described herein, and each —CH₂— is optionally substituted. In some embodiments, L^{a} is —(CH₂)ₙ₁—N(R′)—C(O)—(CH₂)ₙ₂—, wherein each variable is independently as described herein. In some embodiments, —(CH₂)ₙ₁— is bonded to X¹¹. In some embodiments, n1 is 1, 2, 3, 4, 5, 6, 7, 8, 9, or 10. In some embodiments, n1 is 1. In some embodiments, n1 is 2. In some embodiments, n1 is 3. In some embodiments, n2 is 1, 2, 3, 4, 5, 6, 7, 8, 9, or 10. In some embodiments, n2 is 1. In some embodiments, n2 is 2. In some embodiments, n2 is 3. In some embodiments, n2 is 4. In some embodiments, n2 is 5. In some embodiments, R′ of —N(R′)— of L^{a} and R^{a3} are taken together with their intervening atoms to form an optionally substituted ring. In some embodiments, a formed ring is optionally substituted 3-10 membered monocyclic, saturated or partially unsaturated ring having, in addition to the nitrogen atom to which R′ is attached, 0-3 heteroatoms. In some embodiments, a formed ring is saturated. In some embodiments, a formed ring is 3-membered. In some embodiments, a formed ring is 4-membered. In some embodiments, a formed ring is 5-membered. In some embodiments, a formed ring is 6-membered. In some embodiments, a formed ring is 7-membered. In some embodiments, a formed ring is 8-membered. In some embodiments, a formed ring has no ring heteroatoms other than the nitrogen atom to which R′ is attached. In some embodiments, X¹¹ is a residue of PyrS2.

[0804] In some embodiments, X¹¹ is stapled. In some embodiments, X¹¹ is stapled with X⁴. In some embodiments, X¹¹ is PyrS2 and stapled.

[0805] In some embodiments, a staple, e.g., L^{s}, has the structure of -L^{s1}-L^{s2}-L^{s3}, wherein each variable is independently as described herein. In some embodiments, L^{s1} or L^{s3} is L^{a} of X¹¹ as described herein. In some embodiments, L^{s3} is L^{a} of X¹¹ as described herein. In some embodiments, L^{s1} is L^{a} of another amino acid residue, e.g., X⁴. In some embodiments, L^{s1} is L as described herein. In some embodiments, L is an optionally substituted bivalent linear or branched C₁₋₁₀ hydrocarbon chain. In some embodiments, L is an optionally substituted bivalent linear C1-10 hydrocarbon chain. In some embodiments, L is a bivalent linear or branched C₁₋₁₀ hydrocarbon chain. In some embodiments, L is a bivalent linear C₁₋₁₀ hydrocarbon chain. In some embodiments, L is optionally substituted —(CH₂)ₙ—, wherein n is 1-10. In some embodiments, L is —(CH₂)ₙ—, wherein n is 1-10. In some embodiments, L is —CH₂—. In some embodiments, L is —(CH₂)₂—. In some embodiments, L is —(CH₂)₃—. In some embodiments, L is —(CH₂)₄—. In some embodiments, L is an optionally substituted bivalent linear or branched C₁₋₁₀ hydrocarbon chain wherein one or more methylene units of L are independently replaced with —C(R′)₂—, —C(O)—, —N(R′)—, -Cy- or —O—. In some embodiments, L is an optionally substituted bivalent linear C₁₋₁₀ hydrocarbon chain wherein one or more methylene units of L are independently replaced with —C(R′)₂—, —C(O)—, —N(R′)—, -Cy- or —O—. In some embodiments, L^{s3} is L as described herein. In some embodiments, L^{s3} is —(CH₂)ₙ₁— N(R′)—C(O)—(CH₂)ₙ₂—, wherein each variable is independently as described herein, and each —CH₂— is optionally substituted. In some embodiments, L^{s3} is —(CH₂)ₙ₁— N(R′)—C(O)—(CH₂)ₙ₂—, wherein each variable is independently as described herein. In some embodiments, —(CH₂)ₙ₁— is bonded to X¹¹. In some embodiments, n1 is 1, 2, 3, 4, 5, 6, 7, 8, 9, or 10. In some embodiments, n1 is 1. In some embodiments, n1 is 2. In some embodiments, n1 is 3. In some embodiments, n2 is 1, 2, 3, 4, 5, 6, 7, 8, 9, or 10. In some embodiments, n2 is 1. In some embodiments, n2 is 2. In some embodiments, n2 is 3. In some embodiments, n2 is 4. In some embodiments, n2 is 5. In some embodiments, R′ of —N(R′)— of L^{a} and R^{a1} are taken together with their intervening atoms to form an optionally substituted ring. In some embodiments, a formed ring is optionally substituted 3-10 membered monocyclic, saturated or partially unsaturated ring having, in addition to the nitrogen atom to which R′ is attached, 0-3 heteroatoms. In some embodiments, a formed ring is saturated. In some embodiments, a formed ring is 3-membered. In some embodiments, a formed ring is 4-membered. In some embodiments, a formed ring is 5-membered. In some embodiments, a formed ring is 6-membered. In some embodiments, a formed ring is 7-membered. In some embodiments, a formed ring is 8-membered. In some embodiments, a formed ring has no ring heteroatoms other than the nitrogen atom to which R′ is attached.

[0806] In some embodiments, L^{s2} is optionally substituted —CH═CH—. In some embodiments, L^{s2} is —CH═CH—. In some embodiments, L^{s2} is optionally substituted —CH₂—CH₂—. In some embodiments, L^{s2} is —CH₂—CH₂—.

[0807] In some embodiments, X¹¹ is or comprises a residue of an amino acid or a moiety selected from Table A-I, Table A-II, Table A-III and Table A-IV.

[0808] In some embodiments, X¹¹ is a residue of an amino acid selected from PyrS2, S8, PyrS, S7, PyrS3, SeN, Az, S4, S6, SdN, S10, S5, SgN or PyrS1. In some embodiments, X¹¹ is a residue of PyrS2. In some embodiments, X¹¹ is a residue of S8. In some embodiments, X¹¹ is a residue of PyrS. In some embodiments, X¹¹ is a residue of S7. In some embodiments, X¹¹ is a residue of PyrS3. In some embodiments, X¹¹ is a residue of SeN. In some embodiments, X¹¹ is a residue of Az. In some embodiments, X¹¹ is a residue of S4. In some embodiments, X¹¹ is a residue of S6. In some embodiments, X¹¹ is a residue of SdN. In some embodiments, X¹¹ is a residue of S10. In some embodiments, X¹¹ is a residue of S5. In some embodiments, X¹¹ is a residue of SgN. In some embodiments, X¹ is a residue of PyrS1.

[0809] In some embodiments, X¹¹ is stapled. In some embodiments, X¹¹ is stapled with X⁴.

[0810] In some embodiments, X¹¹ is amino acid residue not suitable for stapling, e.g., via olefin metathesis. In some embodiments, X¹¹ comprises a polar side chain. In some embodiments, X¹¹ comprises anon-polar side chain. In some embodiments, X¹¹ comprises a hydrophobic side chain. In some embodiments, X¹¹ comprises an aliphatic side chain. In some embodiments, X¹¹ comprises an alkyl side chain. In some embodiments, X¹¹ comprises a side chain comprising an optionally substituted aromatic group. In some embodiments, X¹¹ comprises a side chain comprising an acidic group, e.g., —COOH. In some embodiments, X¹¹ comprises a side chain comprising a basic group, e.g., —N(R)₂. In some embodiments, X¹¹ comprises a detectable moiety such as a fluorescent moiety. In some embodiments, X¹¹ is Ala. In some embodiments, X¹¹ is Phe.

[0811] In some embodiments, X¹¹ is selected from S8, PyrS2, PyrS, S7, PyrS3, SeN, Ala, Az, Phe, S4, S6, SdN, S10, S5, SgN, and PyrS1.

[0812] In some embodiments, X¹ is a residue of Az2, Az3, PyrR2, PyrS4, SeNc5, SPip1, SPip2, SPip3, Aib, Ala, Az, Leu, Phe, PyrS, PyrS1, PyrS2, PyrS3, S10, S4, S5, S6, S7, S8, SdN, SeN, or SgN.

[0813] In some embodiments, X¹ is a residue of Az2, Az3, PyrR2, PyrS4, SeNc5, SPip1, SPip2, or SPip3.

[0814] In some embodiments, X¹ is a residue of Aib, Ala, Az, Leu, Phe, PyrS, PyrS1, PyrS2, PyrS3, S10, S4, S5, S6, S7, S8, SdN, SeN, or SgN.

[0815] Various types of amino acid residues can be used for X², e.g., a residue of an amino acid of formula A-I, A-II, A-III, A-IV, A-V, A-VI, etc. or a salt thereof in accordance with the present disclosure. In some embodiments, X¹² is —N(R^{a1})-L^{a1}-C(R^{a2})(R^{a3})-L^{a2}-C(O)—, wherein each variable is independently as described herein. In some embodiments, X² is —N(R^{a1})—C(R^{a2})(R^{a3})—C(O)—, wherein each variable is independently as described herein. In some embodiments, X¹² is —N(R^{a1})—C(R^{a2})H—C(O)—, wherein each variable is independently as described herein. In some embodiments, R^{a1} is —H. In some embodiments, R^{a3} is —H.

[0816] In some embodiments, X¹² comprises a side chain which is or comprises an optionally substituted aromatic group. In some embodiments, X¹² is an aromatic amino acid residue as described herein. In some embodiments, an aromatic group is optionally substituted 5-membered heteroaryl having 1-3 heteroatoms. In some embodiments, an aromatic group is optionally substituted 5-membered heteroaryl having 1-3 nitrogen atoms. In some embodiments, an aromatic group is optionally substituted 5-membered heteroaryl having one oxygen atom. In some embodiments, an aromatic group is optionally substituted 5-membered heteroaryl having one sulfur atom. In some embodiments, an aromatic group is optionally substituted 6-membered heteroaryl having 1-3 heteroatoms. In some embodiments, an aromatic group is optionally substituted 6-membered heteroaryl having 1 nitrogen atom. In some embodiments, an aromatic group is optionally substituted phenyl. In some embodiments, X¹² comprises a side chain which is or comprises an optionally substituted aromatic group, wherein each substituent of the aromatic group is independently selected from halogen, —OR, —R, —C(O)OH, —C(O)NH₂, —CN, or —NO₂, wherein each R is independently C₁₋₄ alkyl or haloalkyl. In some embodiments, an aromatic group is phenyl. In some embodiments, an aromatic group is optionally substituted 8-10 membered bicyclic aryl or heteroaryl having 1-5 heteroatoms. In some embodiments, X¹² comprises a side chain which is or comprises an optionally substituted aromatic group, wherein each substituent of the aromatic group is independently halogen. In some embodiments, X¹² comprises a side chain which is or comprises two optionally substituted aromatic groups. In some embodiments, X¹² comprises a side chain which is or comprises an optionally substituted aromatic group, wherein each substituent of the aromatic group is independently selected from halogen or —OH. In some embodiments, an aromatic group is phenyl. In some embodiments, an aromatic group is optionally substituted 8-10 membered bicyclic aryl or heteroaryl having 0-5 heteroatoms. In some embodiments, an aromatic group is optionally substituted 9-10 membered bicyclic aryl or heteroaryl having one heteroatom. In some embodiments, X¹² is a residue of an amino acid of formula A-I or a salt thereof. In some embodiments, an amino acid residue has the structure of —NH—C(R^{a2})(R^{a3})—C(O)— or a salt thereof. In some embodiments, an amino acid residue has the structure of —NH—CH(R^{a3})—C)O)— or a salt thereof. As described herein, R^{a3} is -L^{a}-R′ wherein each variable is independently as described herein. In some embodiments, R′ is R as described herein. In some embodiments, R is an optionally substituted group selected from phenyl, 10-membered bicyclic aryl, 5−6 membered heteroaryl having 1-4 heteroatoms, and 9-10 membered bicyclic heteroaryl having 1-5 heteroatoms. In some embodiments, each substituent is independently halogen or —OH or C₁₋₆ haloaliphatic. In some embodiments, each substituent is independently halogen or —OH. In some embodiments, R is optionally substituted phenyl. In some embodiments, R is phenyl. In some embodiments, R is optionally substituted aryl. In some embodiments, R is aryl. In some embodiments, R is optionally substituted 5-membered heteroaryl having 1-4 heteroatoms. In some embodiments, R is optionally substituted 5-membered heteroaryl having 1 heteroatom. In some embodiments, optionally substituted R is 6-membered heteroaryl having 1-4 heteroatoms. In some embodiments, optionally substituted R is 6-membered heteroaryl having 1 heteroatom. In some embodiments, R is optionally substituted 9-membered heteroaryl having 1-5 heteroatoms. In some embodiments, R is optionally substituted 9-membered heteroaryl having 1 heteroatom. In some embodiments, R is optionally substituted 10-membered heteroaryl having 1-5 heteroatoms. In some embodiments, R is optionally substituted 10-membered heteroaryl having 1 heteroatom. In some embodiments, a heteroatom is nitrogen. In some embodiments, a heteroatom is oxygen. In some embodiments, a heteroatom is sulfur. As described herein, L^{a} is L. In some embodiments, L is a covalent bond. In some embodiments, L is an optionally substituted bivalent linear or branched C₁₋₁₀ hydrocarbon chain. In some embodiments, L is an optionally substituted bivalent linear C₁₋₁₀ hydrocarbon chain. In some embodiments, L is a bivalent linear or branched C₁₋₁₀ hydrocarbon chain. In some embodiments, L is a bivalent linear C₁₋₁₀ hydrocarbon chain. In some embodiments, L is optionally substituted —(CH₂)ₙ—, wherein n is 1-10. In some embodiments, L is —(CH₂)ₙ—, wherein n is 1-10. In some embodiments, L is —CH₂—. In some embodiments, L is —(CH₂)₂—. In some embodiments, L is —(CH₂)₃—. In some embodiments, L is —(CH₂)₄—. In some embodiments, L is an optionally substituted bivalent linear or branched C₁₋₁₀ hydrocarbon chain wherein one or more methylene units of L are independently replaced with —C(R′)₂—, —C(O)—, —N(R′)—, -Cy- or —O—. In some embodiments, L is an optionally substituted bivalent linear C₁₋₁₀ hydrocarbon chain wherein one or more methylene units of L are independently replaced with —C(R′)₂—, —C(O)—, —N(R′)—, -Cy- or —O—.

[0817] In some embodiments, X¹² is a residue of an amino acid having the structure of formula A-I, wherein R^{a2} is -L^{a}-R′, and R′ is an optionally substituted aromatic group. In some embodiments, L^{a} is optionally substituted CH₂. In some embodiments, L^{a} is —CH₂—. In some embodiments, X¹² comprises a side chain which is or comprises an optionally substituted aromatic group, wherein each substituent of the aromatic group is independently selected from halogen, —OR, —R, —N(R)₂, —C(O)N(R)₂, or —CN, wherein each R is independently —H, C₁₋₄ alkyl or haloalkyl, or -Ph. In some embodiments, X¹² comprises a side chain which is or comprises an optionally substituted aromatic group, wherein each substituent of the aromatic group is independently selected from halogen, —OR, —R, —NH₂, —C(O)NH₂, -Ph, or —CN, wherein each R is independently C₁₋₄ alkyl or haloalkyl. In some embodiments, X¹² comprises a side chain which is or comprises an optionally substituted aromatic group, wherein each substituent of the aromatic group is independently selected from halogen, —OR, —R, —NH₂, —C(O)NH₂, -Ph, or —CN, wherein each R is independently C₁₋₂ alkyl or haloalkyl. In some embodiments, X¹² comprises a side chain which is or comprises an optionally substituted aromatic group, wherein each substituent of the aromatic group is independently selected from halogen, —OR, —R, NH₂, —C(O)NH₂, -Ph, or —CN, wherein each R is independently methyl optionally substituted with one or more halogen. In some embodiments, X¹² comprises a side chain which is or comprises an optionally substituted aromatic group, wherein each substituent of the aromatic group is independently selected from —F, —OR, —CH₃, —NH₂, —C(O)NH₂, -Ph, or —CN, wherein each R is independently methyl optionally substituted with one or more —F. In some embodiments, X¹² comprises a side chain which is or comprises an optionally substituted aromatic group, wherein each substituent of the aromatic group is independently selected from —F, —OR, —CH₃, —CF₃, —NH₂, —C(O)NH₂, -Ph, or —CN. In some embodiments, X¹² comprises a side chain which is or comprises an optionally substituted aromatic group, wherein each substituent of the aromatic group is independently selected from halogen, —CH₃, —CF₃, or —CN. In some embodiments, X¹² comprises a side chain which is or comprises an aromatic group optionally substituted at 2′-position. In some embodiments, X¹² comprises a side chain which is or comprises an unsubstituted aromatic group. In some embodiments, an aromatic group is optionally substituted 5-membered heteroaryl having 1-3 heteroatoms. In some embodiments, an aromatic group is optionally substituted 5-membered heteroaryl having 1-3 nitrogen atoms. In some embodiments, an aromatic group is optionally substituted 5-membered heteroaryl having one oxygen atom. In some embodiments, an aromatic group is optionally substituted 5-membered heteroaryl having one sulfur atom. In some embodiments, an aromatic group is optionally substituted phenyl. In some embodiments, an aromatic group is optionally substituted 8-10 membered bicyclic aryl or heteroaryl having 1-5 heteroatoms. In some embodiments, X¹² is selected from Phe, 3Thi, 2ClF, 3FF, 20MeF, 2FF, Pff, 2CBMF, 3ClF, 3F3MeF, 1NapA, 2NapA, 2PyrA, 4CBMF, 4COOHF, 4F3MeF, Tyr, 2BrF, 2F3MeF, 2Thi, 4PyrA, hPhe, Trp, 1meH, 23FF, 2MeF, 34FF, 30MeF, 3PyrA, 4ClF, 4CNF, His, 2CNF, 2NO2F, 35FF, 3CBMF, 3CNF, 3MeF, 3meH, 4FF, 4MeF, 4Thz, BztA, dPhe, and hTyr. In some embodiments, X² is 3Thi. In some embodiments, X¹² is Phe. In some embodiments, X¹² is Phe, wherein the phenyl group is substituted. In some embodiments, X¹² is Phe, wherein the phenyl group is 2′-substituted. In some embodiments, X¹² is 1FF. In some embodiments, X¹² is 2ClF. In some embodiments, X¹² is 2BrF. In some embodiments, X¹² is 2F3MeF. In some embodiments, X¹² is 2MeF. In some embodiments, X¹² is 2CNF.

[0818] In some embodiments, X¹² comprises a polar side chain. In some embodiments, X¹² comprises a non-polar side chain. In some embodiments, X¹² comprises a hydrophobic side chain. In some embodiments, X¹² comprises an aliphatic side chain. In some embodiments, X¹² comprises an alkyl side chain. In some embodiments, X¹² comprises a side chain comprising a cycloaliphatic group (e.g., a 5- or 6-membered cycloalkyl group). In some embodiments, X¹² comprises a side chain comprising an optionally substituted aromatic group. In some embodiments, X¹² comprises a side chain comprising an acidic group, e.g., —COOH. In some embodiments, X¹² comprises a side chain comprising a basic group, e.g., —N(R)₂. In some embodiments, X¹² is Gln. In some embodiments, X¹² is Asn. In some embodiments, X¹² is Asp. In some embodiments, X¹² is Glu. In some embodiments, X¹² is Cha. In some embodiments, X¹² is CypA. In some embodiments, X¹² is Ala. In some embodiments, X¹² is nLeu. In some embodiments, X¹² is Npg. In some embodiments, X¹² is [Acryl]Dap.

[0819] In some embodiments, X¹² is a polar amino acid residue as described herein. In some embodiments, X¹² is hydrophobic amino acid residue as described herein. In some embodiments, X¹² is a hydrophobic amino acid residue as described herein.

[0820] In some embodiments, X¹² is a residue of amino acid that comprises an acidic or polar group. In some embodiments, X¹² is a residue of amino acid whose side chain comprises an acidic group, e.g., a —COOH group or a salt form thereof (e.g., a compound of formula A-IV, etc.). Various acidic amino acid residues described herein may be utilized for X¹², e.g., those described for X², X⁵, X⁶, etc. In some embodiments, X¹² is 2COOHF. In some embodiments, X¹² is a residue of amino acid whose side chain comprises a polar group. In some embodiments, X² is a residue of amino acid whose side chain comprises an amide group, e.g., —C(O)N(R′)₂ such as —CONH₂. For example, in some embodiments, X¹² is a residue of 2cbmF. Various other polar amino acid residues described herein may also be utilized for X¹².

[0821] In some embodiments, X¹² is selected from Phe, 3Thi, 2ClF, 3FF, 20MeF, 2FF, Pff, Asp, 2CBMF, 3ClF, 3F3MeF, 1NapA, 2NapA, 2PyrA, 4CBMF, 4COOHF, 4F3MeF, Tyr, 2BrF, 2F3MeF, 2Thi, 4PyrA, Cha, CypA, hPhe, Trp, dPhe, [Acryl]Dap, 1meH, 23FF, 2MeF, 34FF, 30MeF, 3PyrA, 4ClF, 4CNF, Ala, Glu, His, 2CNF, 2NO2F, 35FF, 3CBMF, 3CNF, 3MeF, 3meH, 4FF, 4MeF, 4Thz, Asn, BztA, dPhe and hTyr.

[0822] In some embodiments, X¹² is or comprises a residue of an amino acid or a moiety selected from Table A-IV.

[0823] In some embodiments, X¹² is a residue of [CyPr]-3SF, [Ph]3SF, [Ph]-3SF, 3BrF, 3CBMF, Cba, [Acryl]Dap, 1meH, 1NapA, 23FF, 2BrF, 2CBMF, 2ClF, 2CNF, 2F3MeF, 2FF, 2MeF, 2NapA, 2N02F, 20MeF, 2pyrA, 2Thi, 34FF, 35FF, 3ClF, 3CNF, 3F3MeF, 3FF, 3MeF, 3meH, 30MeF, 3PyrA, 3thi, 4CBMF, 4ClF, 4CNF, 4COOHF, 4F3MeF, 4FF, 4MeF, 4PyrA, 4Thz, Ala, Asn, Asp, BztA, Cha, CypA, dPhe, Gln, Glu, His, hPhe, hTyr, Leu, Npg, Pff, Phe, PyrS2, Trp, or Tyr.

[0824] In some embodiments, X¹² is a residue of [CyPr]-3SF, [Ph]3SF, [Ph]-3SF, 3BrF, 3CBMF, or Cba.

[0825] In some embodiments, X¹² is a residue of [Acryl]Dap, 1meH, 1NapA, 23FF, 2BrF, 2CBMF, 2ClF, 2CNF, 2F3MeF, 2FF, 2MeF, 2NapA, 2N02F, 20MeF, 2pyrA, 2Thi, 34FF, 35FF, 3ClF, 3CNF, 3F3MeF, 3FF, 3MeF, 3meH, 30MeF, 3PyrA, 3thi, 4CBMF, 4ClF, 4CNF, 4COOHF, 4F3MeF, 4FF, 4MeF, 4PyrA, 4Thz, Ala, Asn, Asp, BztA, Cha, CypA, dPhe, Gln, Glu, His, hPhe, hTyr, Leu, Npg, Pff, Phe, PyrS2, Trp, or Tyr.

[0826] Various types of amino acid residues can be used for X¹³, e.g., a residue of an amino acid of formula A-I, A-II, A-III, A-IV, A-V, A-VI, etc. or a salt thereof in accordance with the present disclosure. In some embodiments, X¹³ is —N(R^{a1})-L^{a1}-C(R^{a2})(R^{a3})-L^{a2}-C(O)—, wherein each variable is independently as described herein. In some embodiments, X¹³ is —N(R^{a1})—C(R^{a2})(R^{a3})—C(O)—, wherein each variable is independently as described herein. In some embodiments, X¹³ is —N(R^{a1})—C(R^{a2})H—C(O)—, wherein each variable is independently as described herein. In some embodiments, R^{a1} is —H. In some embodiments, R^{a3} is —H.

[0827] Various types of amino acid residues can be used for X¹³, e.g., a residue of an amino acid of formula A-I, A-II, A-III, A-IV, A-V, A-VI, etc. or a salt thereof in accordance with the present disclosure. In some embodiments, X¹³ is —N(R^{a1})-L^{a1}-C(R^{a2})(R^{a3})-L^{a2}-C(O)—, wherein each variable is independently as described herein. In some embodiments, X¹³ is —N(R^{a1})—C(R^{a2})(R^{a3})—C(O)—, wherein each variable is independently as described herein. In some embodiments, X¹³ is —N(R^{a1})—C(R^{a2})H—C(O)—, wherein each variable is independently as described herein. In some embodiments, R^{a1} is —H. In some embodiments, R^{a3} is —H.

[0828] In some embodiments, X¹³ comprises a side chain which is or comprises an optionally substituted aromatic group. In some embodiments, X¹³ is an aromatic amino acid residue as described herein.

[0829] In some embodiments, X¹³ is a residue of an amino acid having the structure of formula A-I, wherein R^{a2} is -L^{a}-R′, and R′ is an optionally substituted aromatic group. In some embodiments, an aromatic group is optionally substituted 5-membered heteroaryl having 1-3 heteroatoms. In some embodiments, an aromatic group is optionally substituted 5-membered heteroaryl having 1-3 nitrogen atoms. In some embodiments, an aromatic group is optionally substituted 5-membered heteroaryl having one sulfur atom. In some embodiments, an aromatic group is optionally substituted phenyl. In some embodiments, X¹³ comprises a side chain which is or comprises an optionally substituted aromatic group, wherein each substituent of the aromatic group is independently selected from halogen, —OR, —R, —C(O)OH, or —CN, wherein each R is independently hydrogen or C₁₋₄ alkyl or haloalkyl. In some embodiments, an aromatic group is phenyl. In some embodiments, an aromatic group is optionally substituted 8-10 membered bicyclic aryl or heteroaryl having 1-5 heteroatoms. In some embodiments, X¹³ comprises a side chain which is or comprises an optionally substituted aromatic group, wherein each substituent of the aromatic group is independently halogen. In some embodiments, X¹³ comprises a side chain which is or comprises two optionally substituted aromatic groups. In some embodiments, X¹³ comprises a side chain which is or comprises an optionally substituted aromatic group, wherein each substituent of the aromatic group is independently selected from halogen or —OH. In some embodiments, an aromatic group is phenyl. In some embodiments, an aromatic group is optionally substituted 8-10 membered bicyclic aryl or heteroaryl having 0-5 heteroatoms. In some embodiments, an aromatic group is optionally substituted 9-10 membered bicyclic aryl or heteroaryl having one heteroatom. In some embodiments, X¹³ is a residue of an amino acid of formula A-I or a salt thereof. In some embodiments, an amino acid residue has the structure of —NH—C(R^{a2})(R^{a3})—C(O)— or a salt thereof. In some embodiments, an amino acid residue has the structure of —NH—CH(R^{a3})—C)O)— or a salt thereof. As described herein, R^{a3} is -L^{a}-R′ wherein each variable is independently as described herein. In some embodiments, R′ is R as described herein. In some embodiments, R is an optionally substituted group selected from phenyl, 10-membered bicyclic aryl, 5−6 membered heteroaryl having 1-4 heteroatoms, and 9-10 membered bicyclic heteroaryl having 1-5 heteroatoms. In some embodiments, each substituent is independently halogen or —OH or C₁₋₆ haloaliphatic. In some embodiments, each substituent is independently halogen or —OH. In some embodiments, R is optionally substituted phenyl. In some embodiments, R is phenyl. In some embodiments, R is optionally substituted aryl. In some embodiments, R is aryl. In some embodiments, R is optionally substituted 5-membered heteroaryl having 1-4 heteroatoms. In some embodiments, R is optionally substituted 5-membered heteroaryl having 1 heteroatom. In some embodiments, optionally substituted R is 6-membered heteroaryl having 1-4 heteroatoms. In some embodiments, optionally substituted R is 6-membered heteroaryl having 1 heteroatom. In some embodiments, R is optionally substituted 9-membered heteroaryl having 1-5 heteroatoms. In some embodiments, R is optionally substituted 9-membered heteroaryl having 1 heteroatom. In some embodiments, R is optionally substituted 10-membered heteroaryl having 1-5 heteroatoms. In some embodiments, R is optionally substituted 10-membered heteroaryl having 1 heteroatom. In some embodiments, a heteroatom is nitrogen. In some embodiments, a heteroatom is oxygen. In some embodiments, a heteroatom is sulfur. As described herein, L^{a} is L. In some embodiments, L is a covalent bond. In some embodiments, L is an optionally substituted bivalent linear or branched C₁₋₁₀ hydrocarbon chain. In some embodiments, L is an optionally substituted bivalent linear C₁₋₁₀ hydrocarbon chain. In some embodiments, L is a bivalent linear or branched C₁₋₁₀ hydrocarbon chain. In some embodiments, L is a bivalent linear C₁₋₁₀ hydrocarbon chain. In some embodiments, L is optionally substituted —(CH₂)ₙ—, wherein n is 1-10. In some embodiments, L is —(CH₂)ₙ—, wherein n is 1-10. In some embodiments, L is —CH₂—. In some embodiments, L is —(CH₂)₂—. In some embodiments, Lis —(CH₂)₃—. In some embodiments, L is —(CH₂)₄—. In some embodiments, L is an optionally substituted bivalent linear or branched C₁₋₁₀ hydrocarbon chain wherein one or more methylene units of L are independently replaced with —C(R′)₂—, —C(O)—, —N(R′)—, -Cy- or —O—. In some embodiments, L is an optionally substituted bivalent linear C₁₋₁₀ hydrocarbon chain wherein one or more methylene units of L are independently replaced with —C(R′)₂—, —C(O)—, —N(R′)—, -Cy- or —O—.

[0830] In some embodiments, L^{a} is optionally substituted CH₂. In some embodiments, L^{a} is —CH₂—. In some embodiments, X¹³ comprises a side chain which is or comprises an optionally substituted aromatic group, wherein each substituent of the aromatic group is independently selected from halogen, —OR, —R, —N(R)₂, —C(O)N(R)₂, or —CN, wherein each R is independently —H, C₁₋₄ alkyl or haloalkyl, or -Ph. In some embodiments, X¹³ comprises a side chain which is or comprises an optionally substituted aromatic group, wherein each substituent of the aromatic group is independently selected from halogen, —OR, —R, —NH₂, —C(O)NH₂, -Ph, or —CN, wherein each R is independently C₁₋₄ alkyl or haloalkyl. In some embodiments, X¹³ comprises a side chain which is or comprises an optionally substituted aromatic group, wherein each substituent of the aromatic group is independently selected from halogen, —OR, —R, —NH₂, —C(O)NH₂, -Ph, or —CN, wherein each R is independently C₁₋₂ alkyl or haloalkyl. In some embodiments, X¹³ comprises a side chain which is or comprises an optionally substituted aromatic group, wherein each substituent of the aromatic group is independently selected from halogen, —OR, —R, NH₂, —C(O)NH₂, -Ph, or —CN, wherein each R is independently methyl optionally substituted with one or more halogen. In some embodiments, X¹³ comprises a side chain which is or comprises an optionally substituted aromatic group, wherein each substituent of the aromatic group is independently selected from —F, —OR, —CH₃, —NH₂, —C(O)NH₂, -Ph, or —CN, wherein each R is independently methyl optionally substituted with one or more —F. In some embodiments, X¹³ comprises a side chain which is or comprises an optionally substituted aromatic group, wherein each substituent of the aromatic group is independently selected from —F, —OR, —CH₃, —CF₃, —NH₂, —C(O)NH₂, -Ph, or —CN. In some embodiments, X¹³ comprises a side chain which is or comprises an optionally substituted aromatic group, wherein each substituent of the aromatic group is independently selected from halogen, —CH₃, —CF₃, or —CN. In some embodiments, X¹³ comprises a side chain which is or comprises an aromatic group optionally substituted at 2′-position. In some embodiments, X¹³ comprises a side chain which is or comprises an unsubstituted aromatic group. In some embodiments, an aromatic group is optionally substituted 5-membered heteroaryl having 1-3 heteroatoms. In some embodiments, an aromatic group is optionally substituted 5-membered heteroaryl having 1-3 nitrogen atoms. In some embodiments, an aromatic group is optionally substituted 5-membered heteroaryl having one oxygen atom. In some embodiments, an aromatic group is optionally substituted 5-membered heteroaryl having one sulfur atom. In some embodiments, an aromatic group is optionally substituted phenyl. In some embodiments, an aromatic group is optionally substituted 8-10 membered bicyclic aryl or heteroaryl having 1-5 heteroatoms. In some embodiments, an aromatic group is optionally substituted 9-membered bicyclic heteroaryl having 1-5 heteroatoms. In some embodiments, an aromatic group is optionally substituted 10-membered bicyclic heteroaryl having 1-5 heteroatoms. In some embodiments, an aromatic group is optionally substituted 10-membered bicyclic heteroaryl having one heteroatom which is sulfur. In some embodiments, an aromatic group is optionally substituted 10-membered bicyclic heteroaryl having one heteroatom which is oxygen. In some embodiments, an aromatic group is optionally substituted 10-membered bicyclic heteroaryl having one heteroatom which is nitrogen. In some embodiments, an aromatic group is optionally substituted 10-membered bicyclic aryl.

[0831] In some embodiments, X¹³ is selected from BztA, Trp, 2NapA, 1NapA, WCHO, 5CpW, 5FW, aMeW, H2Trp, His, Phe, 23FF, 34FF, 340MeF, 1MeW, 5CF3W, 5ClW, 5MeOW, 6ClW, 6F1NapA, 7F1NapA, 7FW, Bip, and Qui. In some embodiments, X¹³ is selected from BztA, Trp, 2NapA, 1NapA, WCHO, 5CpW, 5FW, aMeW, H2Trp, 1MeW, 5CF3W, 5ClW, 5MeOW, 6ClW, 6F1NapA, 7F1NapA, 7FW, and Qui. In some embodiments, X¹³ is selected from BztA, Trp, 2NapA, 1NapA, WCHO, 5CpW, 5FW, aMeW, 1MeW, 5CF3W, 5ClW, 5MeOW, 6ClW, 6F1NapA, 7F1NapA, 7FW, and Qui. In some embodiments, X¹³ is BztA. In some embodiments, X¹³ is Trp. In some embodiments, X¹³ is 1NapA. In some embodiments, X¹³ is 2NapA.

[0832] In some embodiments, X¹³ comprises a polar side chain. In some embodiments, X¹³ comprises a non-polar side chain. In some embodiments, X¹³ comprises a hydrophobic side chain. In some embodiments, X¹³ comprises an aliphatic side chain. In some embodiments, X¹³ comprises an alkyl side chain. In some embodiments, X¹³ comprises a side chain comprising a cycloaliphatic group (e.g., a 5- or 6-membered cycloalkyl group). In some embodiments, X¹³ comprises a side chain comprising an optionally substituted aromatic group. In some embodiments, X¹³ comprises a side chain comprising an acidic group, e.g., —COOH. In some embodiments, X¹³ comprises a side chain comprising a basic group, e.g., —N(R)₂. In some embodiments, X¹³ is Gln. In some embodiments, X¹³ is Asn. In some embodiments, X¹³ is Asp. In some embodiments, X¹³ is Glu. In some embodiments, X¹³ is Cha. In some embodiments, X¹³ is CypA. In some embodiments, X¹³ is Ala. In some embodiments, X¹³ is nLeu. In some embodiments, X¹³ is Npg. In some embodiments, X¹³ is [Acryl]Dap.

[0833] In some embodiments, X¹³ is selected from BztA, Trp, 2NapA, 1NapA, WCHO, 5CpW, 5FW, Ala, aMeW, H2Trp, His, Phe, 23FF, 34FF, 340MeF, 1MeW, 5CF3W, 5ClW, 5MeOW, 6ClW, 6F1NapA, 7F1NapA, 7FW, Bip, and Qui.

[0834] In some embodiments, X¹³ is or comprises a residue of an amino acid or a moiety selected from Table A-IV.

[0835] In some embodiments, X¹³ is a residue of 2F3MeW, 34ClF, 34MeF, 3Br4FF, 3BrF, 4ClBztA, 4ClW, 4FW, 5IndA, 7AzaW, 7ClBztA, 7FBztA, Cba, RbMe2NapA, RbMeBztA, SbMe2NapA, SbMeBztA, 1MeW, 1NapA, 23FF, 2F3MeF, 2NapA, 34FF, 340MeF, 3ClF, 3Thi, 4ClF, 5CF3W, 5ClW, 5CpW, 5FW, 5MeOW, 6ClW, 6F1NapA, 7F1NapA, 7FW, Ala, aMeW, Bip, BztA, Cha, H2Trp, His, Phe, PyrS2, Qui, Trp, Tyr, or WCHO.

[0836] In some embodiments, X¹³ is a residue of 2F3MeW, 34ClF, 34MeF, 3Br4FF, 3BrF, 4ClBztA, 4ClW, 4FW, 5IndA, 7AzaW, 7ClBztA, 7FBztA, Cba, RbMe2NapA, RbMeBztA, SbMe2NapA, or SbMeBztA.

[0837] In some embodiments, X¹³ is a residue of 1MeW, 1NapA, 23FF, 2F3MeF, 2NapA, 34FF, 340MeF, 3ClF, 3Thi, 4ClF, 5CF3W, 5ClW, 5CpW, 5FW, 5MeOW, 6ClW, 6F1NapA, 7F1NapA, 7FW, Ala, aMeW, Bip, BztA, Cha, H2Trp, His, Phe, PyrS2, Qui, Trp, Tyr, or WCHO.

[0838] Various types of amino acid residues can be used for X¹⁴, e.g., a residue of an amino acid of formula A-I, A-II, A-III, A-IV, A-V, A-VI, etc. or a salt thereof in accordance with the present disclosure. In some embodiments, X¹⁴ is —N(R^{a1})-L^{a1}-C(R^{a2})(R^{a3})-L^{a2}-C(O)—, wherein each variable is independently as described herein. In some embodiments, X¹⁴ is —N(R^{a1})—C(R^{a2})(R^{a3})—C(O)—, wherein each variable is independently as described herein. In some embodiments, X¹⁴ is —N(R^{a1})—C(R^{a2})H—C(O)—, wherein each variable is independently as described herein. In some embodiments, R^{a1} is —H. In some embodiments, R^{a3} is —H.

[0839] In some embodiments, X¹⁴ comprises a polar side chain. In some embodiments, X¹⁴ is a polar amino acid residue as described herein. In some embodiments, X¹⁴ comprises a non-polar side chain. In some embodiments, X¹⁴ comprises a hydrophobic side chain. In some embodiments, X¹⁴ is a hydrophobic amino acid residue as described herein. In some embodiments, X¹⁴ comprises an aliphatic side chain. In some embodiments, X¹⁴ comprises an alkyl side chain. In some embodiments, X¹⁴ comprises a side chain comprising a cycloaliphatic group (e.g., a 5- or 6-membered cycloalkyl group). In some embodiments, X¹⁴ comprises a side chain comprising an optionally substituted aromatic group. In some embodiments, X¹⁴ comprises a side chain comprising an acidic group, e.g., —COOH. In some embodiments, X¹⁴ comprises a side chain comprising a basic group, e.g., —N(R)₂. In some embodiments, X¹⁴ is Gln.

[0840] In some embodiments, X¹⁴ is selected from Gln, His, Ser, dThr, Thr, Ala, Hse, Asn, Leu, Aib, Alaol, Throl, Leuol, dAsn, dGln, dHis, Tyr, [AzAc]Lys, 1MeH, 3MeH, 4TriA, dSer, NMeHis, NMeS, Pro, Trp, Val, MorphAla, 2FurA, Abu, Arg, Dab, iPrLys, Phe, Pheol, and Prool.

[0841] In some embodiments, X¹⁴ is a residue of an amino alcohol, e.g., Throl, Alaol, Leuol, Pheol or Prool. In some embodiments, an amino alcohol has a structure corresponding an amino acid wherein a —COOH group is replaced with a —OH group. In some embodiments, when X¹⁴ is a residue of an amino alcohol, it is the last residue at the C-terminus. Such a sequence may be properly considered to have —OH as a C-terminus capping group, or such amino alcohol residues may be considered as C-terminus capping groups.

[0842] In some embodiments, X¹⁵ is or comprises a residue of an amino acid or a moiety selected from Table A-IV.

[0843] In some embodiments, X¹⁴ is or comprises a residue of an amino acid or a moiety selected from Table A-IV.

[0844] In some embodiments, X¹⁴ is a residue of [3C]TriAzLys, [4F3CPip]GlnR, [4MePpzPip]GlnR, [4Pippip]GlnR, [AcPpz]GlnR, [bismethoxyethylamine]GlnR, [Me2NPrPip]GlnR, [Morph]GlnR, [NHEt]GlnR, [NMe2]GlnR, [Pip]GlnR, [PropynPEG14]Lys, [RDMAPyr]GlnR, [TfePpz]GlnR, AcLys, BnBoroleK, F2PipNva, GlnR, Me2Asn, Me2Gln, MePpzAsn, Met20, MorphAsn, MorphGln, MorphNva, dAla, MeAsn, 1MeH, 2cbmf, 2F3MeF, 2FurA, 3cbmf, 3MeH, 4TriA, Abu, Aib, Ala, Alaol, Arg, Asn, Asp, BztA, Cha, Dab, dAsn, dGln, dHis, dSer, dThr, Gln, His, Hse, iPrLys, Leu, Leuol, Lys, MorphAla, NMeHis, NMeS, Npg, Phe, Pheol, Pro, Prool, PyrS2, S5, Ser, Thr, Throl, Trp, Tyr, or Val.

[0845] In some embodiments, X¹⁴ is a residue of [3C]TriAzLys, [4F3CPip]GlnR, [4MePpzPip]GlnR, [4Pippip]GlnR, [AcPpz]GlnR, [bismethoxyethylamine]GlnR, [Me2NPrPip]GlnR, [Morph]GlnR, [NHEt]GlnR, [NMe2]GlnR, [Pip]GlnR, [PropynPEG14]Lys, [RDMAPyr]GlnR, [TfePpz]GlnR, AcLys, BnBoroleK, F2PipNva, GlnR, Me2Asn, Me2Gln, MePpzAsn, Met20, MorphAsn, MorphGln, MorphNva, dAla, or MeAsn.

[0846] In some embodiments, X¹⁴ is a residue of 1MeH, 2cbmf, 2F3MeF, 2FurA, 3cbmf, 3MeH, 4TriA, Abu, Aib, Ala, Alaol, Arg, Asn, Asp, BztA, Cha, Dab, dAsn, dGln, dHis, dSer, dThr, Gln, His, Hse, iPrLys, Leu, Leuol, Lys, MorphAla, NMeHis, NMeS, Npg, Phe, Pheol, Pro, Prool, PyrS2, S5, Ser, Thr, Throl, Trp, Tyr, or Val.

[0847] In some embodiments, p14 is 1. In some embodiments, p14 is 0.

[0848] Various type of amino acid residues can be utilized for X⁵, e.g., a residue of an amino acid of formula A-I, A-II, A-III, A-IV, A-V, A-VI, etc. or a salt thereof in accordance with the present disclosure. In some embodiments, X⁵ is —N(R^{a1})-L^{a1}-C(R^{a2})(R^{a3})-L^{a2}-C(O)—, wherein each variable is independently as described herein. In some embodiments, X¹⁵ is —N(R^{a1})—C(R^{a2})(R^{a3})—C(O)—, wherein each variable is independently as described herein. In some embodiments, X⁵ is —N(R^{a1})—C(R^{a2})H—C(O)—, wherein each variable is independently as described herein. In some embodiments, R^{a1} is —H. In some embodiments, R^{a3} is —H.

[0849] In some embodiments, X¹⁵ comprises a polar side chain as described herein. In some embodiments, X¹⁵ comprises a non-polar side chain. In some embodiments, X¹⁵ comprises a hydrophobic side chain as described herein. In some embodiments, X⁵ comprises an aliphatic side chain. In some embodiments, X¹⁵ comprises an alkyl side chain. In some embodiments, a side chain of X¹⁵ is C₁₋₁₀ alkyl. In some embodiments, X¹⁵ comprises a side chain comprising an optionally substituted aromatic group. In some embodiments, X¹⁵ comprises a side chain comprising an acidic group, e.g., —COOH. In some embodiments, X¹⁵ comprises a side chain comprising a basic group, e.g., —N(R)₂. In some embodiments, X¹⁵ comprises a detectable moiety such as a fluorescent moiety.

[0850] In some embodiments, X¹⁵ is Ala. In some embodiments, X¹⁵ is dAla. In some embodiments. In some embodiments, X¹⁵ comprises a detectable moiety such as a fluorescent moiety. In some embodiments, X¹⁵ is Lys. In some embodiments, X¹⁵ is substituted or labeled lysine. In some embodiments, X¹⁵ is selected from [1Napc]Lys, [1NapPr]Lys, [22PhPr]Lys, [2Napc]Lys, [35CF3PhPr]Lys, [4MePipBz]Lys, [AdamantC]Lys, [AzAc]Lys, [Bua]Lys, [Me2NCBz]Lys, [Me3AdamantC]Lys, [MeBipipAc]Lys, [MeMorphBz]Lys, [MePipAc]Lys, [MorphAc]Lys, [mPEG2]Lys, [mPEG4]Lys, [mPEG6]Lys, [mPEG8]Lys, [Oct]Lys, [PropynPEG1]Lys, [PropynPEG2]Lys, [PropynPEG3]Lys, [PropynPEG4]Lys, 6AmHex, 6AzHex, Aib, Ala, dAla, dIle, Ile, and Lys.

[0851] In some embodiments, X¹⁵ is a residue of a compound without a carboxyl group, e.g., 6AmHex, 6AzHex, etc. In some embodiments, when X¹⁵ is such a residue, it is the last residue at the C-terminus. Such a sequence may be properly considered to have X¹⁵ as a C-terminus capping group.

[0852] In some embodiments, X¹⁵ is or comprises a residue of an amino acid or a moiety selected from Table A-IV.

[0853] In some embodiments, X¹⁵ is a residue of [3C]TriAzdLys, [3C]TriAzLys, [lithocholate]-Lys, [lithocholate-PEG2]-Lys, [Me2NCBz]Lys, [Me3AdamantC-PEG2]-Lys, [PropynPEG14]Lys, dAla, dIle, [1Napc]Lys, [1NapPr]Lys, [22PhPr]Lys, [2Napc]Lys, [35CF3PhPr]Lys, [4MePipBz]Lys, [AdamantC]Lys, [Bua]Lys, [Me3AdamantC]Lys, [Me3AdamantC]-Lys, [MeBipipAc]Lys, [MeMorphBz]Lys, [MePipAc]Lys, [MorphAc]Lys, [mPEG2]Lys, [mPEG4]Lys, [mPEG6]Lys, [mPEG8]Lys, [Oct]Lys, [PropynPEG1]Lys, [PropynPEG2]Lys, [PropynPEG3]Lys, [PropynPEG4]Lys, 6AmHex, Aib, Ala, Alaol, BztA, Gln, Ile, Leuol, Leu, Lys, NEt2, NHBn, NHCyHe, NHCyPr, NHEt, OH, Phe, Pheol, Prool, Throl, or Val.

[0854] In some embodiments, X¹⁵ is a residue of [3C]TriAzdLys, [3C]TriAzLys, [lithocholate]-Lys, [lithocholate-PEG2]-Lys, [Me2NCBz]Lys, [Me3AdamantC-PEG2]-Lys, [PropynPEG14]Lys, dAla, or dIle.

[0855] In some embodiments, X¹⁵ is a residue of [1Napc]Lys, [1NapPr]Lys, [22PhPr]Lys, [2Napc]Lys, [35CF3PhPr]Lys, [4MePipBz]Lys, [AdamantC]Lys, [Bua]Lys, [Me3AdamantC]Lys, [Me3AdamantC]-Lys, [MeBipipAc]Lys, [MeMorphBz]Lys, [MePipAc]Lys, [MorphAc]Lys, [mPEG2]Lys, [mPEG4]Lys, [mPEG6]Lys, [mPEG8]Lys, [Oct]Lys, [PropynPEG1]Lys, [PropynPEG2]Lys, [PropynPEG3]Lys, [PropynPEG4]Lys, 6AmHex, Aib, Ala, Alaol, BztA, Gln, Ile, Leuol, Leu, Lys, NEt2, NHBn, NHCyHe, NHCyPr, NHEt, OH, Phe, Pheol, Prool, Throl, or Val.

[0856] In some embodiments, p15 is 1. In some embodiments, p15 is 0.

[0857] Various types of amino acid residues can be used for X¹⁶, e.g., a residue of an amino acid of formula A-I, A-II, A-III, A-IV, A-V, A-VI, etc. or a salt thereof in accordance with the present disclosure. In some embodiments, X¹⁶ is —N(R^{a1})-L^{a1}-C(R^{a2})(R^{a3})-L^{a2}-C(O)—, wherein each variable is independently as described herein. In some embodiments, X¹⁶ is —N(R^{a1})—C(R^{a2})(R^{a3})—C(O)—, wherein each variable is independently as described herein. In some embodiments, X¹⁶ is —N(R^{a1})—C(R^{a2})H—C(O)—, wherein each variable is independently as described herein. In some embodiments, R^{a1} is —H. In some embodiments, R^{a3} is —H.

[0858] In some embodiments, X¹⁶ comprises a polar side chain. In some embodiments, it is a polar amino acid residue as described herein. In some embodiments, X¹⁶ comprises a non-polar side chain. In some embodiments, X¹⁶ comprises a hydrophobic side chain. In some embodiments, it is a hydrophobic amino acid residue as described herein. In some embodiments, X¹⁶ comprises an aliphatic side chain. In some embodiments, X¹⁶ comprises an alkyl side chain. In some embodiments, a side chain of X¹⁶ is C₁₋₁₀ alkyl. In some embodiments, X¹⁶ comprises a side chain comprising an optionally substituted aromatic group. In some embodiments, it is an aromatic amino acid residue as described herein. In some embodiments, X¹⁶ comprises a side chain comprising an acidic group, e.g., —COOH. In some embodiments, it is an acidic amino acid residue as described herein. In some embodiments, X¹⁶ comprises a side chain comprising a basic group, e.g., —N(R)₂. In some embodiments, it is a basic amino acid residue as described herein. In some embodiments, X¹⁶ comprises a detectable moiety such as a fluorescent moiety. In some embodiments, X¹⁶ is Ala. In some embodiments, X¹⁶ is dAla.

[0859] In some embodiments, X¹⁶ is or comprises a residue of an amino acid or a moiety selected from Table A-IV.

[0860] In some embodiments, X¹⁶ is a residue of Cbg, Cpg, CyLeu, dLeu, dAla, Aib, Ala, Arg, Asn, dGln, dThr, Gln, Ile, Leu, nLeu, Phe, Ser, Thr, Trp, Tyr, or Val.

[0861] In some embodiments, X¹⁶ is a residue of Cbg, Cpg, CyLeu, dLeu, or dAla.

[0862] In some embodiments, X¹⁶ is a residue of Aib, Ala, Arg, Asn, dGln, dThr, Gln, Ile, Leu, nLeu, Phe, Ser, Thr, Trp, Tyr, or Val.

[0863] In some embodiments, p16 is 1. In some embodiments, p16 is 0.

[0864] Various types of amino acid residues can be used for X¹⁷, e.g., a residue of an amino acid of formula A-I, A-II, A-III, A-IV, A-V, A-VI, etc. or a salt thereof in accordance with the present disclosure. In some embodiments, X¹⁷ is —N(R^{a1})-L^{a1}-C(R^{a2})(R^{a3})-L^{a2}-C(O)—, wherein each variable is independently as described herein. In some embodiments, X¹⁷ is —N(R^{a1})—C(R^{a2})(R^{a3})—C(O)—, wherein each variable is independently as described herein. In some embodiments, X¹⁷ is —N(R^{a1})—C(R^{a2})H—C(O)—, wherein each variable is independently as described herein. In some embodiments, R^{a1} is —H. In some embodiments, R^{a3} is —H.

[0865] In some embodiments, X¹⁷ comprises a polar side chain. In some embodiments, it is a polar amino acid residue as described herein. In some embodiments, X¹⁷ comprises a non-polar side chain. In some embodiments, X¹⁷ comprises a hydrophobic side chain. In some embodiments, it is a hydrophobic amino acid residue as described herein. In some embodiments, X¹⁷ comprises an aliphatic side chain. In some embodiments, X¹⁷ comprises an alkyl side chain. In some embodiments, a side chain of X¹⁷ is C₁₋₁₀ alkyl. In some embodiments, X¹⁷ comprises a side chain comprising an optionally substituted aromatic group. In some embodiments, it is an aromatic amino acid residue as described herein. In some embodiments, X¹⁷ comprises a side chain comprising an acidic group, e.g., —COOH. In some embodiments, it is an acidic amino acid residue as described herein. In some embodiments, X¹⁷ comprises a side chain comprising a basic group, e.g., —N(R)₂. In some embodiments, it is a basic amino acid residue as described herein. In some embodiments, X¹⁷ comprises a detectable moiety such as a fluorescent moiety. In some embodiments, X¹⁷ is Ala, dAla, or Leu. In some embodiments, X¹⁷ is Ala. In some embodiments, X¹⁷ is dAla. In some embodiments, X¹⁷ is Leu.

[0866] In some embodiments, X¹⁷ is or comprises a residue of an amino acid or a moiety selected from Table A-IV.

[0867] In some embodiments, p17 is 1. In some embodiments, p17 is 0.

[0868] Various types of amino acid residues can be used for X¹⁸, e.g., a residue of an amino acid of formula A-I, A-II, A-III, A-IV, A-V, A-VI, etc. or a salt thereof in accordance with the present disclosure. In some embodiments, X's is —N(R^{a1})-L^{a1}-C(R^{a2})(R^{a3})-L^{a2}-C(O)—, wherein each variable is independently as described herein. In some embodiments, X¹⁸ is —N(R^{a1})—C(R^{a2})(R^{a3})—C(O)—, wherein each variable is independently as described herein. In some embodiments, X's is —N(R^{a1})—C(R^{a2})H—C(O)—, wherein each variable is independently as described herein. In some embodiments, R^{a1} is —H. In some embodiments, R^{a3} is —H.

[0869] In some embodiments, X's comprises a polar side chain. In some embodiments, it is a polar amino acid residue as described herein. In some embodiments, X¹⁸ comprises a non-polar side chain. In some embodiments, X¹⁸ comprises a hydrophobic side chain. In some embodiments, it is a hydrophobic amino acid residue as described herein. In some embodiments, X¹⁸ comprises an aliphatic side chain. In some embodiments, X¹⁸ comprises an alkyl side chain. In some embodiments, a side chain of X¹⁸ is C₁₋₁₀ alkyl. In some embodiments, X¹⁸ comprises a side chain comprising an optionally substituted aromatic group. In some embodiments, it is an aromatic amino acid residue as described herein. In some embodiments, X¹⁸ comprises a side chain comprising an acidic group, e.g., —COOH. In some embodiments, it is an acidic amino acid residue as described herein. In some embodiments, X¹⁸ comprises a side chain comprising a basic group, e.g., —N(R)₂. In some embodiments, it is a basic amino acid residue as described herein. In some embodiments, X¹⁸ comprises a detectable moiety such as a fluorescent moiety. In some embodiments, X¹⁸ is Aib, Ala, or Leu. In some embodiments, X¹⁸ is Ala or Leu. In some embodiments, X¹⁸ is Aib. In some embodiments, X¹⁸ is Ala. In some embodiments, X¹⁸ is Leu.

[0870] In some embodiments, X¹⁸ is or comprises a residue of an amino acid or a moiety selected from Table A-IV.

[0871] In some embodiments, p18 is 1. In some embodiments, p18 is 0.

[0872] Various types of amino acid residues can be used for X¹⁹, e.g., a residue of an amino acid of formula A-I, A-II, A-III, A-IV, A-V, A-VI, etc. or a salt thereof in accordance with the present disclosure. In some embodiments, X¹⁹ is —N(R^{a1})-L^{a1}-C(R^{a2})(R^{a3})-L^{a2}-C(O)—, wherein each variable is independently as described herein. In some embodiments, X¹⁹ is —N(R^{a1})—C(R^{a2})(R^{a3})—C(O)—, wherein each variable is independently as described herein. In some embodiments, X¹⁹ is —N(R^{a1})—C(R^{a2})H—C(O)—, wherein each variable is independently as described herein. In some embodiments, R^{a1} is —H. In some embodiments, R^{a3} is —H.

[0873] In some embodiments, X¹⁹ comprises a polar side chain. In some embodiments, it is a polar amino acid residue as described herein. In some embodiments, X¹⁹ comprises a non-polar side chain. In some embodiments, X¹⁹ comprises a hydrophobic side chain. In some embodiments, it is a hydrophobic amino acid residue as described herein. In some embodiments, X¹⁹ comprises an aliphatic side chain. In some embodiments, X¹⁹ comprises an alkyl side chain. In some embodiments, a side chain of X¹⁹ is C₁₋₁₀ alkyl. In some embodiments, X¹⁹ comprises a side chain comprising an optionally substituted aromatic group. In some embodiments, it is an aromatic amino acid residue as described herein. In some embodiments, X¹⁹ comprises a side chain comprising an acidic group, e.g., —COOH. In some embodiments, it is an acidic amino acid residue as described herein. In some embodiments, X¹⁹ comprises a side chain comprising a basic group, e.g., —N(R)₂. In some embodiments, it is a basic amino acid residue as described herein. In some embodiments, X¹⁹ comprises a detectable moiety such as a fluorescent moiety. In some embodiments, X¹⁹ is Aib, Ala, or Leu. In some embodiments, X¹⁹ is Ala or Leu. In some embodiments, X¹⁹ is Aib. In some embodiments, X¹⁹ is Ala. In some embodiments, X¹⁹ is Leu.

[0874] In some embodiments, X¹⁹ is or comprises a residue of an amino acid or a moiety selected from Table A-IV.

[0875] In some embodiments, p19 is 1. In some embodiments, p19 is 0.

[0876] Various types of amino acid residues can be used for X²⁰, e.g., a residue of an amino acid of formula A-I, A-II, A-III, A-IV, A-V, A-VI, etc. or a salt thereof in accordance with the present disclosure. In some embodiments, X²⁰ is —N(R^{a1})-L^{a1}-C(R^{a2})(R^{a3})-L^{a2}-C(O)—, wherein each variable is independently as described herein. In some embodiments, X²⁰ is —N(R^{a1})—C(R^{a2})(R^{a3})—C(O)—, wherein each variable is independently as described herein. In some embodiments, X²⁰ is —N(R^{a1})—C(R^{a2})H—C(O)—, wherein each variable is independently as described herein. In some embodiments, R^{a1} is —H. In some embodiments, R^{a3} is —H.

[0877] In some embodiments, X²⁰ comprises a polar side chain. In some embodiments, it is a polar amino acid residue as described herein. In some embodiments, X²⁰ comprises a non-polar side chain. In some embodiments, X²⁰ comprises a hydrophobic side chain. In some embodiments, it is a hydrophobic amino acid residue as described herein. In some embodiments, X²⁰ comprises an aliphatic side chain. In some embodiments, X²⁰ comprises an alkyl side chain. In some embodiments, a side chain of X²⁰ is C₁₋₁₀ alkyl. In some embodiments, X²⁰ comprises a side chain comprising an optionally substituted aromatic group. In some embodiments, it is an aromatic amino acid residue as described herein. In some embodiments, X²⁰ comprises a side chain comprising an acidic group, e.g., —COOH. In some embodiments, it is an acidic amino acid residue as described herein. In some embodiments, X²⁰ comprises a side chain comprising a basic group, e.g., —N(R)₂. In some embodiments, it is a basic amino acid residue as described herein. In some embodiments, X²⁰ comprises a detectable moiety such as a fluorescent moiety. In some embodiments, X²⁰ is Aib, Ala, or Leu. In some embodiments, X²⁰ is Ala or Leu. In some embodiments, X²⁰ is Aib. In some embodiments, X²⁰ is Ala. In some embodiments, X²⁰ is Leu.

[0878] In some embodiments, X²⁰ is or comprises a residue of an amino acid or a moiety selected from Table A-IV.

[0879] In some embodiments, p20 is 1. In some embodiments, p20 is 0.

[0880] Various types of amino acid residues can be used for X²¹, e.g., a residue of an amino acid of formula A-I, A-II, A-III, A-IV, A-V, A-VI, etc. or a salt thereof in accordance with the present disclosure. In some embodiments, X²¹ is —N(R^{a1})-L^{a1}-C(R^{a2})(R^{a3})-L^{a2}-C(O)—, wherein each variable is independently as described herein. In some embodiments, X²¹ is —N(R^{a1})—C(R^{a2})(R^{a3})—C(O)—, wherein each variable is independently as described herein. In some embodiments, X²¹ is —N(R^{a1})—C(R^{a2})H—C(O)—, wherein each variable is independently as described herein. In some embodiments, R^{a1} is —H. In some embodiments, R^{a3} is —H.

[0881] In some embodiments, X²¹ comprises a polar side chain. In some embodiments, it is a polar amino acid residue as described herein. In some embodiments, X²¹ comprises a non-polar side chain. In some embodiments, X²¹ comprises a hydrophobic side chain. In some embodiments, it is a hydrophobic amino acid residue as described herein. In some embodiments, X²¹ comprises an aliphatic side chain. In some embodiments, X²¹ comprises an alkyl side chain. In some embodiments, a side chain of X²¹ is C₁₋₁₀ alkyl. In some embodiments, X²¹ comprises a side chain comprising an optionally substituted aromatic group. In some embodiments, it is an aromatic amino acid residue as described herein. In some embodiments, X²¹ comprises a side chain comprising an acidic group, e.g., —COOH. In some embodiments, it is an acidic amino acid residue as described herein. In some embodiments, X²¹ comprises a side chain comprising a basic group, e.g., —N(R)₂. In some embodiments, it is a basic amino acid residue as described herein. In some embodiments, X²¹ comprises a detectable moiety such as a fluorescent moiety. In some embodiments, X²¹ is Aib, Ala, or Leu. In some embodiments, X²¹ is Ala or Leu. In some embodiments, X²¹ is Aib. In some embodiments, X²¹ is Ala. In some embodiments, X²¹ is Leu.

[0882] In some embodiments, X²¹ is or comprises a residue of an amino acid or a moiety selected from Table A-IV.

[0883] In some embodiments, p21 is 1. In some embodiments, p21 is 0.

[0884] Various types of amino acid residues can be used for X²², e.g., a residue of an amino acid of formula A-I, A-II, A-III, A-IV, A-V, A-VI, etc. or a salt thereof in accordance with the present disclosure. In some embodiments, X²² is —N(R^{a1})-L^{a1}-C(R^{a2})(R^{a3})-L^{a2}-C(O)—, wherein each variable is independently as described herein. In some embodiments, X²² is —N(R^{a1})—C(R^{a2})(R^{a3})—C(O)—, wherein each variable is independently as described herein. In some embodiments, X²² is —N(R^{a1})—C(R^{a2})H—C(O)—, wherein each variable is independently as described herein. In some embodiments, R^{a1} is —H. In some embodiments, R^{a3} is —H.

[0885] In some embodiments, X²² comprises a polar side chain. In some embodiments, it is a polar amino acid residue as described herein. In some embodiments, X²² comprises a non-polar side chain. In some embodiments, X²² comprises a hydrophobic side chain. In some embodiments, it is a hydrophobic amino acid residue as described herein. In some embodiments, X²² comprises an aliphatic side chain. In some embodiments, X²² comprises an alkyl side chain. In some embodiments, a side chain of X²² is C₁₋₁₀ alkyl. In some embodiments, X²² comprises a side chain comprising an optionally substituted aromatic group. In some embodiments, it is an aromatic amino acid residue as described herein. In some embodiments, X²² comprises a side chain comprising an acidic group, e.g., —COOH. In some embodiments, it is an acidic amino acid residue as described herein. In some embodiments, X²² comprises a side chain comprising a basic group, e.g., —N(R)₂. In some embodiments, it is a basic amino acid residue as described herein. In some embodiments, X²² comprises a detectable moiety such as a fluorescent moiety. In some embodiments, X²² is Aib, Ala, or Leu. In some embodiments, X²² is Ala or Leu. In some embodiments, X²² is Aib. In some embodiments, X²² is Ala. In some embodiments, X²² is Leu.

[0886] In some embodiments, X²² is or comprises a residue of an amino acid or a moiety selected from Table A-IV.

[0887] In some embodiments, p22 is 1. In some embodiments, p22 is 0.

[0888] Various types of amino acid residues can be used for X²³, e.g., a residue of an amino acid of formula A-I, A-II, A-III, A-IV, A-V, A-VI, etc. or a salt thereof in accordance with the present disclosure. In some embodiments, X²³ is —N(R^{a1})-L^{a1}-C(R^{a2})(R^{a3})-L^{a2}-C(O)—, wherein each variable is independently as described herein. In some embodiments, X²³ is —N(R^{a1})—C(R^{a2})(R^{a3})—C(O)—, wherein each variable is independently as described herein. In some embodiments, X²³ is —N(R^{a1})—C(R^{a2})H—C(O)—, wherein each variable is independently as described herein. In some embodiments, R^{a1} is —H. In some embodiments, R^{a3} is —H.

[0889] In some embodiments, X²³ comprises a polar side chain. In some embodiments, it is a polar amino acid residue as described herein. In some embodiments, X²³ comprises a non-polar side chain. In some embodiments, X²³ comprises a hydrophobic side chain. In some embodiments, it is a hydrophobic amino acid residue as described herein. In some embodiments, X²³ comprises an aliphatic side chain. In some embodiments, X²³ comprises an alkyl side chain. In some embodiments, a side chain of X²³ is C₁₋₁₀ alkyl. In some embodiments, X²³ comprises a side chain comprising an optionally substituted aromatic group. In some embodiments, it is an aromatic amino acid residue as described herein. In some embodiments, X²³ comprises a side chain comprising an acidic group, e.g., —COOH. In some embodiments, it is an acidic amino acid residue as described herein. In some embodiments, X²³ comprises a side chain comprising a basic group, e.g., —N(R)₂. In some embodiments, it is a basic amino acid residue as described herein. In some embodiments, X²³ comprises a detectable moiety such as a fluorescent moiety. In some embodiments, X²³ is Aib, Ala, or Leu. In some embodiments, X²³ is Ala or Leu. In some embodiments, X²³ is Aib. In some embodiments, X²³ is Ala. In some embodiments, X²³ is Leu.

[0890] In some embodiments, X²³ is or comprises a residue of an amino acid or a moiety selected from Table A-IV.

[0891] In some embodiments, p23 is 1. In some embodiments, p23 is 0.

[0892] In some embodiments, an agent is or comprises a peptide having the structure of:
[0893] R^{N}—[X]ₚ-X¹X²X³X⁴X⁵X⁶X⁷X⁸X⁹X¹⁰X¹¹X¹²X¹³[X¹⁴]ₚ₁₄[X¹⁵]ₚ₁₅[X¹⁶]ₚ₁₆[X¹⁷]ₚ₁₇—[X]p′-R^{C}, or a salt thereof, wherein:
[0894] each X is independently an amino acid residue;
[0895] each p and p′ is independently 0-10;
[0896] R^{N} is independently a peptide, an amino protecting group or R′-L^{RN}-;
[0897] R^{C} is independently a peptide, a carboxyl protecting group, -L^{RC}-R′, —O-L^{RC}-R′ or —N(R′)-L^{RC}-R′;
[0898] each of L^{RN} and L^{RC} is independently L; and
[0899] each other variable is independently as described herein.

[0900] In some embodiments, p is 0. In some embodiments, p is 1, 2, 3, 4, 5, 6, 7, 8, 9, or 10. In some embodiments, p is 1. In some embodiments, p is 2. In some embodiments, p is 3. In some embodiments, p is 4. In some embodiments, p is 5. In some embodiments, p is 6. In some embodiments, p is 7. In some embodiments, p is 8. In some embodiments, p is 9. In some embodiments, p is 10.

[0901] In some embodiments, p′ is 0. In some embodiments, p′ is 1, 2, 3, 4, 5, 6, 7, 8, 9, or 10. In some embodiments, p′ is 1. In some embodiments, p′ is 2. In some embodiments, p′ is 3. In some embodiments, p′ is 4. In some embodiments, p′ is 5. In some embodiments, p′ is 6. In some embodiments, p′ is 7. In some embodiments, p′ is 8. In some embodiments, p′ is 9. In some embodiments, p′ is 10.

[0902] In some embodiments, each X is independently a residue of an amino acid having the structure of A-I, A-II, A-III, A-IV, etc.

[0903] In some embodiments, R^{N} is or comprises a peptide. In some embodiments, R^{N} is a N-terminus capping group. In some embodiments, R^{N} is an amino protecting group. In some embodiments, R^{N} is-L^{RN}-R′. In some embodiments, L^{RN} is —C(O)—. In some embodiments, R^{N} is —C(O)R. In some embodiments, R^{N} is Ac. In some embodiments, R^{N} is AzAc (N₃—CH₂—C(O)—). In some embodiments, R^{N} is 2PyPrpc

[chemical structure]

In some embodiments, R^{N} is MeOPr (CH₃OCH₂CH₂C(O)—).

[0904] In some embodiments, R^{N} is RSO₂ (—SO₂R). In some embodiments, R^{N} is MeSO₂ (—SO₂CH₃). In some embodiments, R^{N} is mPEG2 (CH₃OCH₂CH₂OCH₂CH₂C(O)—). In some embodiments, wherein R^{N} is Nic

[chemical structure]

In some embodiments, R^{N} is Oct (CH₃(CH₂)₆C(O)—). In some embodiments, R^{N} is Pic

[chemical structure]

[0905] In some embodiments, R^{C} is or comprises a peptide. In some embodiments, R^{C} is a C-terminus capping group. In some embodiments, R^{C} is a carboxyl protecting group. In some embodiments, R^{C} is -L^{RC}-R′. In some embodiments, R^{C} is —O-L^{RC}-R′. In some embodiments, R^{C} is —OR′. In some embodiments, R^{C} is —N(R′)-L^{RC}-R′. In some embodiments, R^{C} is —N(R′)₂. In some embodiments, R^{C} is —NHR′. In some embodiments, R^{C} is —N(R)₂. In some embodiments, R^{C} is —NHR. In some embodiments, R^{C} is —NH₂. In some embodiments, R^{C} is —NHEt. In some embodiments, R^{C} is —NHBn. In some embodiments, R^{C} is —NHCyHe

[chemical structure]

In some embodiments, R^{C} is —NHCyPr

[chemical structure]

In some embodiments, R^{C} is —NHCyBu. In some embodiments, R^{C} is −6AmHex, wherein one amino group of −6AmHex is bonded to the last —C(O)— of the peptide backbone (R^{C} is —NH—(CH₂)₆—NH₂). In some embodiments, R^{C} is −6AZHex, wherein the amino group of −6AzHex is bonded to the last —C(O)— of the peptide backbone (R^{C} is —NH—(CH₂)₆—N₃). In some embodiments, R^{C} is -Alaol, wherein the amino group of -Alaol is bonded to the last —C(O)— of the peptide backbone (R^{C} is

[chemical structure]

In some embodiments, R^{C} is -Leuol, wherein the amino group of -Leuol is bonded to the last —C(O)— of the peptide backbone (R^{C} is

[chemical structure]

In some embodiments, R^{C} is -Pheol, wherein the amino group of -Pheol is bonded to the last —C(O)— of the peptide backbone (R^{C} is

[chemical structure]

In some embodiments, R^{C} is -Prool, wherein the amino group of -Prool is bonded to the last —C(O)— of the peptide backbone (R^{C} is

[chemical structure]

In some embodiments, R^{C} is -Throl, wherein the amino group of -Throl is bonded to the last —C(O)— of the peptide backbone (R^{C} is

[chemical structure]

In some embodiments, R^{C} is —OH.

[0906] In some embodiments, an agent that binds to beta-catenin comprises an amino acid residue described herein, e.g., a residue of formula AA or a salt form thereof. In some embodiments, an agent that binds to beta-catenin comprises a TfeGA residue. In some embodiments, an agent that binds to beta-catenin comprises a 2COOHF residue. In some embodiments, an agent that binds to beta-catenin comprises a 3COOHF residue. In some embodiments, such a residue is X², X⁵ or X⁶. In some embodiments, such a residue is X⁵. In some embodiments, such a residue is X⁶.

[0907] Certain useful agents (e.g., stapled peptides) that bind to beta-catenin and compositions thereof are presented in Table E3 as examples; certain data are presented in Table E2 as examples.

### Amino Acids

[0908] As appreciated by those skilled in the art, various amino acids may be utilized in accordance with the present disclosure. For example, both naturally occurring and non-naturally occurring amino acids can be utilized in accordance with the present disclosure. In some embodiments, an amino acid is a compound comprising an amino group that can form an amide group with a carboxyl group and a carboxyl group. In some embodiments, an amino acid is an alpha amino acid. In some embodiments, an amino acid is a beta-amino acid. In some embodiments, an amino acid is a D-amino acid. In some embodiments, an amino acid is a L-amino acid. In some embodiments, an amino acid is an naturally encoded amino acid, e.g., in mammalian cells.

[0909] In some embodiments, an amino acid is a compound having the structure of formula A-I:

NH(R^{a1})-L^{a1}-C(R^{a2})(R^{a3})-L^{a2}-COOH, A-I

or a salt thereof, wherein:
[0910] each of R^{a1}, R^{a2}, R^{a3} is independently -L^{a}-R′;
[0911] each of La, L^{a1} and L^{a2} is independently L;
[0912] each L is independently a covalent bond, or an optionally substituted, bivalent C₁-C₂₅ aliphatic or heteroaliphatic group having 1-10 heteroatoms, wherein one or more methylene units of the group are optionally and independently replaced with —C(R′)₂—, -Cy-, —O—, —S—, —S—S—, —N(R′)—, —C(O)—, —C(S)—, —C(NR′)—, —C(O)N(R′)—, —N(R′)C(O)N(R′)—, —N(R′)C(O)O—, —S(O)—, —S(O)₂—, —S(O)₂N(R′)—, —C(O)S—, or —C(O)O—;
[0913] each -Cy- is independently an optionally substituted bivalent, 3-30 membered, monocyclic, bicyclic or polycyclic ring having 0-10 heteroatoms;
[0914] each R′ is independently —R, —C(O)R, —CO₂R, or —SO₂R;
[0915] each R is independently —H, or an optionally substituted group selected from C₁₋₃₀ aliphatic, C₁₋₃₀ heteroaliphatic having 1-10 heteroatoms, C₆₋₃₀ aryl, C₆₋₃₀ arylaliphatic, C₆₋₃₀ arylheteroaliphatic having 1-10 heteroatoms, 5-30 membered heteroaryl having 1-10 heteroatoms, and 3-30 membered heterocyclyl having 1-10 heteroatoms, or
[0916] two R groups are optionally and independently taken together to form a covalent bond, or:
[0917] two or more R groups on the same atom are optionally and independently taken together with the atom to form an optionally substituted, 3-30 membered, monocyclic, bicyclic or polycyclic ring having, in addition to the atom, 0-10 heteroatoms; or
[0918] two or more R groups on two or more atoms are optionally and independently taken together with their intervening atoms to form an optionally substituted, 3-30 membered, monocyclic, bicyclic or polycyclic ring having, in addition to the intervening atoms, 0-10 heteroatoms.

[0919] In some embodiments, a ring moiety of, e.g., -Cy-, R (including those formed by R groups taken together), etc. is monocyclic. In some embodiments, a ring moiety is bicyclic or polycyclic. In some embodiments, a monocyclic ring is an optionally substituted 3-10 (3, 4, 5, 6, 7, 8, 9, or 10, 3-8, 3-7, 4-7, 4−6, 5−6, etc.) membered, saturated, partially unsaturated or aromatic ring having 0-5 heteroatoms. In some embodiments, each monocyclic ring unit of a bicyclic or polycyclic ring moiety is independently an optionally substituted 3-10 (3, 4, 5, 6, 7, 8, 9, or 10, 3-8, 3-7, 4-7, 4−6, 5−6, etc.) membered, saturated, partially unsaturated or aromatic ring having 0-5 heteroatoms.

[0920] In some embodiments, each heteroatom is independently selected from oxygen, nitrogen, sulfur, phosphorus and silicon. In some embodiments, each heteroatom is independently selected from oxygen, nitrogen, and sulfur.

[0921] In some embodiments, L^{a1} is a covalent bond. In some embodiments, a compound of formula A-1 is of the structure NH(R^{a1})—C(R^{a2})(R^{a3})-L^{a2}-COOH.

[0922] In some embodiments, L^{a2} is a covalent bond. In some embodiments, a compound of formula A-1 is of the structure NH(R^{a1})—C(R^{a2})(R^{a3})-L^{a2}-COOH.

[0923] In some embodiments, L^{a1} is a covalent bond and L^{a2} is a covalent bond. In some embodiments, a compound of formula A-1 is of the structure NH(R^{a1})—C(R^{a2})(R^{a3})—COOH.

[0924] In some embodiments, an amino acid is suitable for stapling. In some embodiments, an amino acid comprises a terminal olefin. Certain such amino acids are exemplified herein (e.g., those described in or utilized in peptides of various Tables).

[0925] In some embodiments, an agent comprises a detectable moiety, which can either be detected directly or indirectly. For example, in some embodiments, a detectable moiety is or comprises a fluorescent group. In some embodiments, a detectable moiety is or comprises a biotin moiety. In some embodiments, a detectable moiety is connected to the rest of an agent at an amino acid residue, e.g., through a side chain, optionally through a linker (e.g., L as described herein). In some embodiments, a detectable moiety is —N₃, which may be detected after a click chemistry reaction with a labeled agent comprising an alkyne.

[0926] In some embodiments, the present disclosure provides various compounds, which among other things may be utilized as amino acids for a number of applications, e.g., for preparation of peptides or other useful compounds.

[0927] In some embodiments, a compound (e.g., an amino acid or a protected and/or activated form thereof) or a salt thereof comprises 1) a first group which is an optionally protected amino group, 2) a second group which is an optionally protected and/or activated carboxyl group, and 3) a side chain (typically bonded to an atom between the first and second groups (“a side chain attachment atom”)) which comprises an optionally protected and/or activated carboxyl group and a) an optionally substituted ring (which ring is typically between the optionally protected and/or activated carboxyl group of the side chain and a side chain attachment atom) or b) an amino group (which amino group is typically between the optionally protected and/or activated carboxyl group of the side chain and a side chain attachment atom). In some embodiments, a provided compound is an optionally protected and/or activated amino acid or a salt thereof, wherein the side chain of the amino acid comprises an optionally protected and/or activated carboxyl group, and an optionally substituted ring or an amino group, wherein the optionally substituted ring or an amino group is between the optionally protected and/or activated carboxyl group and a backbone atom to which a side chain is attached (e.g., an atom between an amino and carboxyl group, both of which can be optionally and independently protected and/or activated (e.g., an alpha carbon atom in an amino acid)).

[0928] In some embodiments, the present disclosure provides compounds having the structure of formula PA:

N(R^{PA})(R^{a1})-L^{a1}-C(R^{a2})(R^{a3})-L^{a2}-C(O)R^{PC} PA

or a salt thereof, wherein:
[0929] R^{PA} is —H or an amino protecting group;
[0930] each of R^{a1} and R^{a3} is independently -L^{a}-R′;
[0931] R^{a2} is -L^{aa}-C(O)R^{PS};
[0932] each of L^{a}, L^{a1} and L^{a2} is independently L;
[0933] —C(O)R^{PS} is optionally protected or activated —COOH;
[0934] —C(O)R^{C} is optionally protected or activated —COOH;
[0935] each L is independently a covalent bond, or an optionally substituted, bivalent C₁-C₂₅ aliphatic or heteroaliphatic group having 1-10 heteroatoms wherein one or more methylene units of the group are optionally and independently replaced with —C(R′)₂—, -Cy-, —O—, —S—, —S—S—, —N(R′)—, —C(O)—, —C(S)—, —C(NR′)—, —C(O)N(R′)—, —N(R′)C(O)N(R′)—, —N(R′)C(O)O—, —S(O)—, —S(O)₂—, —S(O)₂N(R′)—, —C(O)S—, or —C(O)O—;
[0936] each -Cy- is independently an optionally substituted bivalent, 3-30 membered, monocyclic, bicyclic or polycyclic ring having 0-10 heteroatoms;
[0937] each R′ is independently —R, —C(O)R, —CO₂R, or —SO₂R; and
[0938] each R is independently —H, or an optionally substituted group selected from C₁₋₃₀ aliphatic, C₁₋₃₀ heteroaliphatic having 1-10 heteroatoms, C₆₋₃₀ aryl, C₆₋₃₀ arylaliphatic, C₆₋₃₀ arylheteroaliphatic having 1-10 heteroatoms, 5-30 membered heteroaryl having 1-10 heteroatoms, and 3-30 membered heterocyclyl having 1-10 heteroatoms, or
[0939] two R groups are optionally and independently taken together to form a covalent bond, or:
[0940] two or more R groups on the same atom are optionally and independently taken together with the atom to form an optionally substituted, 3-30 membered, monocyclic, bicyclic or polycyclic ring having, in addition to the atom, 0-10 heteroatoms; or
[0941] two or more R groups on two or more atoms are optionally and independently taken together with their intervening atoms to form an optionally substituted, 3-30 membered, monocyclic, bicyclic or polycyclic ring having, in addition to the intervening atoms, 0-10 heteroatoms.

[0942] In some embodiments, compounds (e.g., amino acids, such as those of formula A-I or protected/activated forms thereof) having the structure of formula PA:

N(R^{PA})(R^{a1})-L^{a1}-C(R^{a2})(R^{a3})-L^{a2}-C(O)R^{PC} PA

or a salt thereof, wherein:
[0943] R^{PA} is —H or an amino protecting group;
[0944] each of R^{a1} and R^{a3} is independently -L^{a}-R′;
[0945] R^{a2} is -L^{aa}-C(O)R^{PS}, wherein L^{aa} is L and L^{aa} comprises —N(R′)— or -Cy-;
[0946] each of L^{a1} and L^{a2} is independently L;
[0947] —C(O)R^{PS} is optionally protected or activated —COOH;
[0948] —C(O)R^{C} is optionally protected or activated —COOH;
[0949] each L is independently a covalent bond, or an optionally substituted, bivalent C₁-C₂₅ aliphatic or heteroaliphatic group having 1-10 heteroatoms wherein one or more methylene units of the group are optionally and independently replaced with —C(R′)₂—, -Cy-, —O—, —S—, —S—S—, —N(R′)—, —C(O)—, —C(S)—, —C(NR′)—, —C(O)N(R′)—, —N(R′)C(O)N(R′)—, —N(R′)C(O)O—, —S(O)—, —S(O)₂—, —S(O)₂N(R′)—, —C(O)S—, or —C(O)O—;
[0950] each -Cy- is independently an optionally substituted bivalent, 3-30 membered, monocyclic, bicyclic or polycyclic ring having 0-10 heteroatoms;
[0951] each R′ is independently —R, —C(O)R, —CO₂R, or —SO₂R; and
[0952] each R is independently —H, or an optionally substituted group selected from C₁₋₃₀ aliphatic, C₁₋₃₀ heteroaliphatic having 1-10 heteroatoms, C₆₋₃₀ aryl, C₆₋₃₀ arylaliphatic, C₆₋₃₀ arylheteroaliphatic having 1-10 heteroatoms, 5-30 membered heteroaryl having 1-10 heteroatoms, and 3-30 membered heterocyclyl having 1-10 heteroatoms, or
[0953] two R groups are optionally and independently taken together to form a covalent bond, or:
[0954] two or more R groups on the same atom are optionally and independently taken together with the atom to form an optionally substituted, 3-30 membered, monocyclic, bicyclic or polycyclic ring having, in addition to the atom, 0-10 heteroatoms; or
[0955] two or more R groups on two or more atoms are optionally and independently taken together with their intervening atoms to form an optionally substituted, 3-30 membered, monocyclic, bicyclic or polycyclic ring having, in addition to the intervening atoms, 0-10 heteroatoms.

[0956] In some embodiments, L^{a1} is a covalent bond. In some embodiments, L^{a1} is not a covalent bond.

[0957] In some embodiments, L^{a2} is a covalent bond. In some embodiments, L^{a2} is not a covalent bond.

[0958] In some embodiments, R^{a2} is -L^{aa}-C(O)R^{PS}, wherein L^{aa} is an optionally substituted, bivalent C₁-C₂₅ aliphatic or heteroaliphatic group having 1-10 heteroatoms wherein one or more methylene units of the group are optionally and independently replaced with —C(R′)₂—, -Cy-, —O—, —S—, —S—S—, —N(R′)—, —C(O)—, —C(S)—, —C(NR′)—, —C(O)N(R′)—, —N(R′)C(O)N(R′)—, —N(R′)C(O)O—, —S(O)—, —S(O)₂—, —S(O)₂N(R′)—, —C(O)S—, or —C(O)O—, wherein at least one methylene unit is replaced with -Cy-.

[0959] As used herein, in some embodiments, -Cy- is an optionally substituted bivalent 3-10 (e.g., 3, 4, 5, 6, 7, 8, 9, or 10) membered monocyclic cycloaliphatic group. In some embodiments, -Cy- is an optionally substituted 3-10 (e.g., 3, 4, 5, 6, 7, 8, 9, or 10) membered monocyclic cycloalkyl ring. In some embodiments, -Cy- is an optionally substituted 3-10 (e.g., 3, 4, 5, 6, 7, 8, 9, or 10) membered monocyclic heteroaliphatic ring having 1-5 heteroatoms. In some embodiments, -Cy- is an optionally substituted 3-10 (e.g., 3, 4, 5, 6, 7, 8, 9, or 10) membered monocyclic heteroalkyl ring having 1-5 heteroatoms. In some embodiments, -Cy- is an optionally substituted bivalent 5-15 (e.g., 5, 6, 7, 8, 9, 10, 11, 12, 13, 14, or 15) membered bicyclic or polycyclic cycloaliphatic group. In some embodiments, -Cy- is an optionally substituted bivalent 5-15 (e.g., 5, 6, 7, 8, 9, 10, 11, 12, 13, 14, or 15) membered bicyclic or polycyclic cycloalkyl group. In some embodiments, -Cy- is an optionally substituted 5-15 (e.g., 5, 6, 7, 8, 9, 10, 11, 12, 13, 14, or 15) membered bicyclic or polycyclic heteroaliphatic ring having 1-5 heteroatoms. In some embodiments, -Cy- is an optionally substituted 5-15 (e.g., 5, 6, 7, 8, 9, 10, 11, 12, 13, 14, or 15) membered bicyclic or polycyclic heterocyclyl ring having 1-5 heteroatoms. In some embodiments, a cycloaliphatic, cycloalkyl, heteroaliphatic or heteroalkyl ring is 3-membered. In some embodiments, it is 4-membered. In some embodiments, it is 5-membered. In some embodiments, it is 6-membered. In some embodiments, it is 7-membered. In some embodiments, it is 8-membered. In some embodiments, it is 9-membered. In some embodiments, it is 10-membered. In some embodiments, it is 11-membered. In some embodiments, it is 12-membered. In some embodiments, -Cy- is optionally substituted phenylene. In some embodiments, -Cy- is an optionally substituted bivalent 10-membered bicyclic aryl ring. In some embodiments, -Cy- is an optionally substituted 5-membered heteroaryl ring having 1-4 heteroatoms. In some embodiments, -Cy- is an optionally substituted 6-membered heteroaryl ring having 1-4 heteroatoms. In some embodiments, -Cy- is an optionally substituted 9-membered bicyclic heteroaryl ring having 1-5 heteroatoms. In some embodiments, -Cy- is an optionally substituted 10-membered bicyclic heteroaryl ring having 1-5 heteroatoms. In some embodiments, a heteroaliphatic, heterocyclyl or heteroaryl ring contains no more than 1 heteroatom. In some embodiments, each heteroatom is independently selected from nitrogen, oxygen and sulfur.

[0960] In some embodiments, -Cy- is an optionally substituted 4-7 membered ring having 0-3 heteroatoms. In some embodiments, -Cy- is an optionally substituted 6-membered aryl ring. In some embodiments, an aryl ring is substituted. In some embodiments, it is substituted with one or more halogen. In some embodiments, it is substituted with one or more —F. In some embodiments, it is not substituted. In some embodiments, it is optionally substituted

[chemical structure]

In some embodiments, it is

[chemical structure]

In some embodiments, it is optionally substituted

[chemical structure]

In some embodiments, it is

[chemical structure]

In some embodiments, it is optionally substituted

[chemical structure]

In some embodiments, it is

[chemical structure]

In some embodiments, -Cy- is an optionally substituted 5-membered heteroaryl ring having 1-3 heteroatoms. In some embodiments, a heteroatom is nitrogen. In some embodiments, a heteroatom is oxygen. In some embodiments, a heteroatom is sulfur. In some embodiments, -Cy- is optionally substituted

[chemical structure]

In some embodiments, -Cy- is

[chemical structure]

[0961] In some embodiments, L^{aa} is -L^{am1}-Cy-L^{am2}-, wherein each of L^{am1} and L^{am2} is independently L^{am}, wherein each L^{am} is independently a covalent bond, or an optionally substituted, bivalent C₁-C₁₀ aliphatic group wherein one or more methylene units of the aliphatic group are optionally and independently replaced with —C(R′)₂—, -Cy-, —O—, —S—, —S—S—, —N(R′)—, —C(O)—, —C(S)—, —C(NR′)—, —C(O)N(R′)—, —N(R′)C(O)N(R′)—, —N(R′)C(O)O—, —S(O)—, —S(O)₂—, —S(O)₂N(R′)—, —C(O)S—, or —C(O)O—.

[0962] In some embodiments, L^{aa} comprises -Cy-. In some embodiments, L^{aa} is -L^{am1}-Cy-L^{am2}-, wherein each of L^{am1}and L^{am2} is independently L^{am}, wherein each L^{am} is independently a covalent bond, or an optionally substituted, bivalent C₁-C₁₀ aliphatic group wherein one or more methylene units of the aliphatic group are optionally and independently replaced with —C(R′)₂—, -Cy-, —O—, —S—, —S—S—, —N(R′)—, —C(O)—, —C(S)—, —C(NR′)—, —C(O)N(R′)—, —N(R′)C(O)N(R′)—, —N(R′)C(O)O—, —S(O)—, —S(O)₂—, —S(O)₂N(R′)—, —C(O)S—, or —C(O)O—. In some embodiments, -L^{am2}- is bonded to —C(O)R^{PS}. In some embodiments, L^{am2} is a covalent bond.

[0963] In some embodiments, -Cy- is an optionally substituted 4-7 membered ring having 0-3 heteroatoms. In some embodiments, -Cy- is an optionally substituted 5-7 membered ring having 0-3 heteroatoms. In some embodiments, -Cy- is an optionally substituted 6-7 membered ring having 0-3 heteroatoms. In some embodiments, -Cy- is an optionally substituted 4-membered ring having 0-1 heteroatoms. In some embodiments, -Cy- is an optionally substituted 5-membered ring having 0-2 heteroatoms. In some embodiments, -Cy- is an optionally substituted 6-membered ring having 0-2 heteroatoms. In some embodiments, -Cy- is an optionally substituted 7-membered ring having 0-3 heteroatoms.

[0964] In some embodiments, R^{a2} is -L^{aa}-C(O)R^{PS}, wherein L^{aa} is an optionally substituted, bivalent C₁-C₂₅ aliphatic or heteroaliphatic group having 1-10 heteroatoms wherein one or more methylene units of the group are optionally and independently replaced with —C(R′)₂—, -Cy-, —O—, —S—, —S—S—, —N(R′)—, —C(O)—, —C(S)—, —C(NR′)—, —C(O)N(R′)—, —N(R′)C(O)N(R′)—, —N(R′)C(O)O—, —S(O)—, —S(O)₂—, —S(O)₂N(R′)—, —C(O)S—, or —C(O)O—, wherein at least one methylene unit is replaced with —N(R′)—.

[0965] In some embodiments, L^{aa} comprises —N(R′)—. In some embodiments, L^{aa} is -L^{am1}-(NR′)-L^{am2}-, wherein each of L^{am1} and L^{am2} is independently L^{am}, wherein each L^{am} is independently a covalent bond, or an optionally substituted, bivalent C₁-C₁₀ aliphatic group wherein one or more methylene units of the aliphatic group are optionally and independently replaced with —C(R′)₂—, -Cy-, —O—, —S—, —S—S—, —N(R′)—, —C(O)—, —C(S)—, —C(NR′)—, —C(O)N(R′)—, —N(R′)C(O)N(R′)—, —N(R′)C(O)O—, —S(O)—, —S(O)₂—, —S(O)₂N(R′)—, —C(O)S—, or —C(O)O—. In some embodiments, -L^{am2}- is bonded to —C(O)R^{PS}. In some embodiments, L^{am1} is optionally substituted C₁₋₄ alkylene. In some embodiments, L^{am1} is optionally substituted —(CH₂)m-, wherein m is 1, 2, 3, or 4. In some embodiments, L^{am1} is —CH₂—. In some embodiments, L^{am2} is optionally substituted linear C₁₋₂ alkylene. In some embodiments, L^{am2} is —[C(R′)₂]n, wherein n is 1 or 2. In some embodiments, L^{am2} is —[CHR′]n, wherein n is 1 or 2. In some embodiments, each R′ is independently —H or optionally substituted C₁₋₆ alkyl. In some embodiments, L^{am2} is optionally substituted —CH₂—. In some embodiments, L^{am2} is —CH₂—. In some embodiments, R′ is —R^{NR}, wherein R^{NR} is R. In some embodiments, R′ is —CH₂—R^{NR}, wherein R^{NR} is R. In some embodiments, R′ of the —N(R′)— is —C(O)R^{NR}, wherein R^{NR} is R. In some embodiments, R′ of the —N(R′)— is —SO₂RN, wherein R^{NR} is R. In some embodiments, R is optionally substituted C₁₋₆ aliphatic or heteroaliphatic having 1-4 heteroatoms. In some embodiments, R is C₁₋₇ alkyl or heteroalkyl having 1-4 heteroatoms optionally substituted with one or more groups independently selected from halogen, a C₅₋₆ aromatic ring having 0-4 heteroatoms, and an optionally substituted 3-10 membered cycloalkyl or heteroalkyl ring having 1-4 heteroatoms. In some embodiments, R is —CF₃. In some embodiments, L^{am2} is or comprises —C(R′)₂— wherein the R′ group and R′ in —N(R′)— are taken together with their intervening atoms to form an optionally substituted, 3-30 membered, monocyclic, bicyclic or polycyclic ring having, in addition to the intervening atoms, 0-10 heteroatoms.

[0966] In some embodiments, L^{aa} is -L^{am1}-N(R′)-L^{am2}-, wherein each of L^{am1} and L^{am2} is independently L^{am}, wherein each L^{am} is independently a covalent bond, or an optionally substituted, bivalent C₁-C₁₀ aliphatic group wherein one or more methylene units of the aliphatic group are optionally and independently replaced with —C(R′)₂—, -Cy-, —O—, —S—, —S—S—, —N(R′)—, —C(O)—, —C(S)—, —C(NR′)—, —C(O)N(R′)—, —N(R′)C(O)N(R′)—, —N(R′)C(O)O—, —S(O)—, —S(O)₂—, —S(O)₂N(R′)—, —C(O)S—, or —C(O)O—.

[0967] In some embodiments, —N(R′)— is bonded to two carbon atoms which two carbon atoms do not form any double bonds with heteroatoms. In some embodiments, —N(R′)— is bonded to two sp3 atoms. In some embodiments, —N(R′)— is bonded to two sp3 carbon atoms. In some embodiments, —N(R′)— is bonded to two —CH₂—, each of which is independently and optionally substituted with one or two monovalent substituent. In some embodiments, —N(R′)— is bonded to two —CH₂—.

[0968] In some embodiments, L^{aa} comprises —N(R′)—. In some embodiments, R′ of the —N(R′)— is —R^{NR}, wherein R^{NR} is R. In some embodiments, R′ of the —N(R′)— is —CH₂—R^{N}, wherein R^{NR} is R, and the —CH₂— is optionally substituted. In some embodiments, R′ of the —N(R′)— is —C(O)R^{NR}, wherein R^{NR} is R. In some embodiments, R′ of the —N(R′)— is —SO₂R^{NR}, wherein R^{NR} is R. In some embodiments, —N(R′)— is —N(Et)-. In some embodiments, —N(R′)— is —N(CH₂CF₃)—. In some embodiments, R′ is optionally substituted C₁₋₆ aliphatic or heteroaliphatic having 1-4 heteroatoms. In some embodiments, R′ is C₁₋₇ alkyl or heteroalkyl having 1-4 heteroatoms, wherein the alkyl or heteroalkyl is optionally substituted with one or more groups independently selected from halogen, a C₅₋₆ aromatic ring having 0-4 heteroatoms, and an optionally substituted 3-10 membered cycloalkyl or heteroalkyl ring having 1-4 heteroatoms. In some embodiments, R is —CF₃.

[0969] In some embodiments, R′ of —N(R′)— is R, R^{a3} is R, and the two R groups are taken together with their intervening atoms to form an optionally substituted 3-10 membered ring having 0-5 heteroatoms in addition to the intervening atoms. In some embodiments, a formed ring is 3-membered. In some embodiments, a formed ring is 4-membered. In some embodiments, a formed ring is 5-membered. In some embodiments, a formed ring is 6-membered. In some embodiments, a formed ring is 7-membered. In some embodiments, a formed ring is monocyclic. In some embodiments, a formed ring is bicyclic or polycyclic. In some embodiments, a formed ring is saturated. In some embodiments, a formed ring is partially unsaturated.

[0970] In some embodiments, L^{am1} is a covalent bond. In some embodiments, L^{am1} is not a covalent bond. In some embodiments, L^{am1} is optionally substituted C₁₋₄ alkylene. In some embodiments, L^{am1} is optionally substituted —(CH₂)m-, wherein m is 1, 2, 3, or 4. In some embodiments, L^{am1} is optionally substituted —CH₂—. In some embodiments, L^{a}m is —CH₂—.

[0971] In some embodiments, L^{am2} is bonded to —C(O)R^{PS}.

[0972] In some embodiments, L^{am2} is a covalent bond. In some embodiments, L^{am2} is a covalent bond when it is between -Cy- and —C(O)R^{PS}. In some embodiments, L^{am2} is not a covalent bond. In some embodiments, L^{am2} is optionally substituted C₁₋₄ alkylene. In some embodiments, L^{am2} is optionally substituted —(CH₂)m-, wherein m is 1, 2, 3, or 4. In some embodiments, L^{am2} is optionally substituted linear C₁₋₂ alkylene. In some embodiments, L^{ai2} is -[C(R′)₂]n, wherein n is 1 or 2. In some embodiments, L^{am2} is —[CHR′]n, wherein n is 1 or 2. In some embodiments, each R′ is independently —H or optionally substituted C₁₋₆ alkyl. In some embodiments, L^{am2} is optionally substituted —CH₂—. In some embodiments, L^{am2} is —CH₂—. In some embodiments, L^{am2} is optionally substituted —CH₂—CH₂—. In some embodiments, L^{am2} is —CH₂—C(CH₃)₂—.

[0973] In some embodiments, L^{am2} is or comprises —C(R′)₂— wherein the R′ group and R′ in —N(R′)— of L^{aa} are taken together with their intervening atoms to form an optionally substituted, 3-30 membered, monocyclic, bicyclic or polycyclic ring having, in addition to the intervening atoms, 0-10 heteroatoms.

[0974] In some embodiments, R^{a2} is -L^{aa}-C(O)R^{PS}, wherein L^{aa} is L as described herein. In some embodiments, L^{aa} is L^{an}a as described herein. In some embodiments, L^{aa} is optionally substituted branched or linear C₁₋₁₀ hydrocarbon chain. In some embodiments, L^{aa} is optionally substituted C₁₋₁₀ (e.g., 1, 2, 3, 4, 5, 6, 7, 8, 9, or 10) alkylene. In some embodiments, L^{aa} is optionally substituted —CH₂—CH₂—. In some embodiments, L^{aa} is —CH₂—CH₂—. In some embodiments, L^{aa} is optionally substituted —CH₂—. In some embodiments, L^{aa} is —CH₂—.

[0975] In some embodiments, L^{a} is L^{aa} as described herein.

[0976] In some embodiments, L^{aa} is L^{a} as described herein.

[0977] As described above, each L is independently a covalent bond, or an optionally substituted, bivalent C₁-C₂₅ aliphatic or heteroaliphatic group having 1-10 heteroatoms wherein one or more methylene units of the group are optionally and independently replaced with —C(R′)₂—, -Cy-, —O—, —S—, —S—S—, —N(R′)—, —C(O)—, —C(S)—, —C(NR′)—, —C(O)N(R′)—, —N(R′)C(O)N(R′)—, —N(R′)C(O)O—, —S(O)—, —S(O)₂—, —S(O)₂N(R′)—, —C(O)S—, or —C(O)O—.

[0978] In some embodiments, L is a covalent bond.

[0979] In some embodiments, L (or L^{a}, L^{aa}, L^{a1}, L^{a2}, L^{s1}, L^{s2}, L^{s3}, or another variable or moiety that can be L, or a linker moiety) is an optionally substituted, bivalent C₁-C₂₅, C₁-C₂₀, C₁-C₁₅, C₁-C₁₀, C₁-C₉, C₁-C₅, C₁-C₇, C₁-C₆, C₁-C₅, C₁-C₄, C₁-C₃, C₁-C₂, or C₁, C₂, C₃, C₄, C₅, C₆, C₇, C₈, C₉, C₁₀, C₁, C₁₂, C₁₃, C₁₄, C₁₅, C₁₆, C₁₇, C₁₈, C₁₉, or C₂₀, aliphatic wherein one or more methylene units of the group are optionally and independently replaced with —C(R′)₂—, -Cy-, —O—, —S—, —S—S—, —N(R′)—, —C(O)—, —C(S)—, —C(NR′)—, —C(O)N(R′)—, —N(R′)C(O)N(R′)—, —N(R′)C(O)O—, —S(O)—, —S(O)₂—, —S(O)₂N(R′)—, —C(O)S—, or —C(O)O—. In some embodiments, L is an optionally substituted, bivalent C₁-C₂₅ aliphatic wherein one or more methylene units of the group are optionally and independently replaced with —C(R′)₂—, -Cy-, —O—, —S—, —S—S—, —N(R′)—, —C(O)—, —C(S)—, —C(NR′)—, —C(O)N(R′)—, —N(R′)C(O)N(R′)—, —N(R′)C(O)O—, —S(O)—, —S(O)₂—, —S(O)₂N(R′)—, —C(O)S—, or —C(O)O—.

[0980] In some embodiments, L, L^{a}, L^{aa}, L^{a1}, L^{a2}, L^{s1}, L^{s2}, L^{s3}, L″, or another variable or moiety that can be L, or a linker moiety, is an optionally substituted, bivalent C₁-C₂₅, C₁-C₂₀, C₁-C₁₅, C₁-C₁₀, C₁-C₉, C₁-C₅, C₁-C₇, C₁-C₆, C₁-C₅, C₁-C₄, C₁-C₃, C₁-C₂, or C₁, C₂, C₃, C₄, C₅, C₆, C₇, C₈, C₉, C₁₀, C₁, C₁₂, C₁₃, C₁₄, C₁₅, C₁₆, C₁₇, C₁₈, C₁₉, or C₂₀, aliphatic wherein one or more methylene units of the group are optionally and independently replaced with —C(R′)₂—, -Cy-, —O—, —S—, —S—S—, —N(R′)—, —C(O)—, —C(S)—, —C(NR′)—, —C(O)N(R′)—, —N(R′)C(O)N(R′)—, —N(R′)C(O)O—, —S(O)—, —S(O)₂—, —S(O)₂N(R′)—, —C(O)S—, or —C(O)O—. In some embodiments, it is an optionally substituted, bivalent C₁-C₁₀, C₁-C₉, C₁-C₅, C₁-C₇, C₁-C₆, C₁-C₅, C₁-C₄, C₁-C₃, C₁-C₂, or C₁, C₂, C₃, C₄, C₅, C₆, C₇, C₈, C₉, or C₁₀, aliphatic wherein one or more methylene units of the group are optionally and independently replaced with —C(R′)₂—, -Cy-, —O—, —S—, —S—S—, —N(R′)—, —C(O)—, —C(S)—, —C(NR′)—, —C(O)N(R′)—, —N(R′)C(O)N(R′)—, —N(R′)C(O)O—, —S(O)—, —S(O)₂—, —S(O)₂N(R′)—, —C(O)S—, or —C(O)O—. In some embodiments, it is an optionally substituted, bivalent C₂ aliphatic wherein one or more methylene units of the group are optionally and independently replaced with —C(R′)₂—, -Cy-, —O—, —S—, —S—S—, —N(R′)—, —C(O)—, —C(S)—, —C(NR′)—, —C(O)N(R′)—, —N(R′)C(O)N(R′)—, —N(R′)C(O)O—, —S(O)—, —S(O)₂—, —S(O)₂N(R′)—, —C(O)S—, or —C(O)O—. In some embodiments, it is an optionally substituted, bivalent C₃ aliphatic wherein one or more methylene units of the group are optionally and independently replaced with —C(R′)₂—, -Cy-, —O—, —S—, —S—S—, —N(R′)—, —C(O)—, —C(S)—, —C(NR′)—, —C(O)N(R′)—, —N(R′)C(O)N(R′)—, —N(R′)C(O)O—, —S(O)—, —S(O)₂—, —S(O)₂N(R′)—, —C(O)S—, or —C(O)O—. In some embodiments, it is an optionally substituted, bivalent C₄ aliphatic wherein one or more methylene units of the group are optionally and independently replaced with —C(R′)₂—, -Cy-, —O—, —S—, —S—S—, —N(R′)—, —C(O)—, —C(S)—, —C(NR′)—, —C(O)N(R′)—, —N(R′)C(O)N(R′)—, —N(R′)C(O)O—, —S(O)—, —S(O)₂—, —S(O)₂N(R′)—, —C(O)S—, or —C(O)O—. In some embodiments, it is an optionally substituted, bivalent C₅ aliphatic wherein one or more methylene units of the group are optionally and independently replaced with —C(R′)₂—, -Cy-, —O—, —S—, —S—S—, —N(R′)—, —C(O)—, —C(S)—, —C(NR′)—, —C(O)N(R′)—, —N(R′)C(O)N(R′)—, —N(R′)C(O)O—, —S(O)—, —S(O)₂—, —S(O)₂N(R′)—, —C(O)S—, or —C(O)O—. In some embodiments, it is an optionally substituted, bivalent C₆ aliphatic wherein one or more methylene units of the group are optionally and independently replaced with —C(R′)₂—, -Cy-, —O—, —S—, —S—S—, —N(R′)—, —C(O)—, —C(S)—, —C(NR′)—, —C(O)N(R′)—, —N(R′)C(O)N(R′)—, —N(R′)C(O)O—, —S(O)—, —S(O)₂—, —S(O)₂N(R′)—, —C(O)S—, or —C(O)O—. In some embodiments, the bivalent aliphatic is saturated. In some embodiments, the bivalent aliphatic is linear. In some embodiments, the bivalent aliphatic is branched. In some embodiments, it is an optionally substituted, bivalent linear saturated C₆ aliphatic wherein one or more methylene units of the group are optionally and independently replaced with —C(R′)₂—, -Cy-, —O—, —S—, —S—S—, —N(R′)—, —C(O)—, —C(S)—, —C(NR′)—, —C(O)N(R′)—, —N(R′)C(O)N(R′)—, —N(R′)C(O)O—, —S(O)—, —S(O)₂—, —S(O)₂N(R′)—, —C(O)S—, or —C(O)O—. In some embodiments, each replacement if any is independently with -Cy-, —O—, —S—, —S—S—, —N(R′)—, —C(O)—, —C(S)—, —C(NR′)—, —C(O)N(R′)—, —N(R′)C(O)N(R′)—, —N(R′)C(O)O—, —S(O)—, —S(O)₂—, —S(O)₂N(R′)—, —C(O)S—, or —C(O)O—. In some embodiments, each replacement if any is independently with -Cy-, —O—, —S—, —N(R′)—, —C(O)—, —C(S)—, —C(NR′)—, —C(O)N(R′)—, —N(R′)C(O)N(R′)—, —N(R′)C(O)O—, —S(O)—, —S(O)₂—, —S(O)₂N(R′)—, —C(O)S—, or —C(O)O—. In some embodiments, each replacement if any is independently with —O—, —S—, —N(R′)—, —C(O)—, —S(O)—, —S(O)₂—, —S(O)₂N(R′)—, —C(O)S—, or —C(O)O—. In some embodiments, each replacement if any is independently with —O—, —S—, —N(R′)—, or —C(O)—. In some embodiments, L, L^{a}, L^{aa}, L^{a1}, L^{a2}, L^{s1}, L^{s2}, L^{s3}, L″, or another variable or moiety that can be L, or a linker moiety, is an optionally substituted, bivalent C₁-C₆ linear saturated aliphatic wherein one or more methylene units is optionally and independently replaced with —O—, —S—, —N(R′)—, or —C(O)—. In some embodiments, it is an optionally substituted, bivalent C₁-C₅ linear saturated aliphatic wherein one or more methylene units is optionally and independently replaced with —O—, —S—, —N(R′)—, or —C(O)—. In some embodiments, it is an optionally substituted, bivalent C₁-C₄ linear saturated aliphatic wherein one or more methylene units is optionally and independently replaced with —O—, —S—, —N(R′)—, or —C(O)—. In some embodiments, it is an optionally substituted, bivalent C₁-C₃ linear saturated aliphatic wherein one or more methylene units is optionally and independently replaced with —O—, —S—, —N(R′)—, or —C(O)—. In some embodiments, it is an optionally substituted, bivalent C₁-C₂ linear saturated aliphatic wherein one or more methylene units is optionally and independently replaced with —O—, —S—, —N(R′)—, or —C(O)—. In some embodiments, it is a bivalent C₁-C₆ linear saturated aliphatic wherein one or more methylene units is optionally and independently replaced with —O—, —S—, —N(R′)—, or —C(O)—. In some embodiments, it is a bivalent C₁-C₅ linear saturated aliphatic wherein one or more methylene units is optionally and independently replaced with —O—, —S—, —N(R′)—, or —C(O)—. In some embodiments, it is a bivalent C₁-C₄ linear saturated aliphatic wherein one or more methylene units is optionally and independently replaced with —O—, —S—, —N(R′)—, or —C(O)—. In some embodiments, it is a bivalent C₁-C₃ linear saturated aliphatic wherein one or more methylene units is optionally and independently replaced with —O—, —S—, —N(R′)—, or —C(O)—. In some embodiments, it is a bivalent C₁-C₂ linear saturated aliphatic wherein one or more methylene units is optionally and independently replaced with —O—, —S—, —N(R′)—, or —C(O)—. In some embodiments, there is no replacement of methylene unit. In some embodiments, there is one replacement. In some embodiments, there is two replacement. In some embodiments, there is three replacement. In some embodiments, there is four or more replacement. In some embodiments, R′ in each moiety that is utilized to replace a methylene unit (e.g., —N(R′)—) as described herein is hydrogen or optionally substituted C₁−6 aliphatic or phenyl. In some embodiments, R′ is each such moiety is hydrogen or optionally substituted C₁₋₆ alkyl. In some embodiments, R′ is each such moiety is hydrogen or C₁₋₆ alkyl. In some embodiments, each -Cy- is optionally substituted bivalent ring selected from 3-10, 3-9, 3-8, 3-7, 5-10, 5-9, 5-8, 5-7, 5−6, or 3, 4, 5, 6, 7, 8, 9, or 10 membered cycloaliphatic and heterocyclylene having 1-3 heteroatoms, phenylene, and 5−6 membered heteroarylene having 1-3 heteroatoms. In some embodiments, -Cy- is optionally substituted bivalent 3-10, 3-9, 3-8, 3-7, 5-10, 5-9, 5-8, 5-7, 5−6, or 3, 4, 5, 6, 7, 8, 9, or 10 membered cycloaliphatic. In some embodiments, -Cy- is optionally substituted 3-10, 3-9, 3-8, 3-7, 5-10, 5-9, 5-8, 5-7, 5−6, or 3, 4, 5, 6, 7, 8, 9, or 10 membered heterocyclylene having 1-3 heteroatoms. In some embodiments, -Cy- is optionally substituted 3-10, 3-9, 3-8, 3-7, 5-10, 5-9, 5-8, 5-7, 5−6, or 3, 4, 5, 6, 7, 8, 9, or 10 membered heterocyclylene having 1 heteroatom. In some embodiments, -Cy- is optionally substituted phenylene. In some embodiments, -Cy- is phenylene. In some embodiments, -Cy- is optionally substituted 5−6 membered heteroarylene having 1-3 heteroatoms. In some embodiments, -Cy- is optionally substituted 5−6 membered heteroarylene having 1 heteroatom. In some embodiments, a heteroatom is nitrogen. In some embodiments, a heteroatom is oxygen. In some embodiments, a heteroatom is sulfur. In some embodiments, L, L^{a}, L^{aa}, L^{a1}, L^{a2}, L^{s1}, L^{s2}, L^{s3}, L″, or another variable or moiety that can be L, or a linker moiety, is optionally substituted —(CH₂)ₙ—. In some embodiments, it is —(CH₂)ₙ—. In some embodiments, n is 1. In some embodiments, n is 2. In some embodiments, n is 3. In some embodiments, n is 4. In some embodiments, n is 5. In some embodiments, n is 6. In some embodiments, n is 7. In some embodiments, n is 8. In some embodiments, n is 9. In some embodiments, n is 10.

[0981] In some embodiments, L, L^{a}, L^{aa}, L^{a1}, L^{a2}, L^{s1}, L^{s2}, L^{s3}, L″, or another variable or moiety that can be L, or a linker moiety, is an optionally substituted, bivalent heteroaliphatic group having 1-10 heteroatoms wherein one or more methylene units of the group are optionally and independently replaced with —C(R′)₂—, -Cy-, —O—, —S—, —S—S—, —N(R′)—, —C(O)—, —C(S)—, —C(NR′)—, —C(O)N(R′)—, —N(R′)C(O)N(R′)—, —N(R′)C(O)O—, —S(O)—, —S(O)₂—, —S(O)₂N(R′)—, —C(O)S—, or —C(O)O—.

[0982] Those skilled in the art appreciate that embodiments described for one linker moiety that can be L or L″ (e.g., L^{aa}, L^{s1}, L^{s2}, L^{s3}, L^{s}, L^{a}, L^{a1}, L^{a2}, L^{RN}, etc.) may also be utilized for another group that can be L or L″ to the extent that such embodiments fall within the definition of L or L″.

[0983] As described above, each R′ is independently —R, —C(O)R, —CO₂R, or —SO₂R. In some embodiments, R′ is -L^{a}-R. In some embodiments, R′ is R. In some embodiments, R′ is —C(O)R. In some embodiments, R′ is —CO₂R. In some embodiments, R′ is —SO₂R. In some embodiments, R′ is —H.

[0984] As described above, each R is independently —H, or an optionally substituted group selected from C₁₋₃₀ aliphatic, C₁-30 heteroaliphatic having 1-10 heteroatoms, C₆₋₃₀ aryl, C₆₋₃₀ arylaliphatic, C₆₋₃₀ arylheteroaliphatic having 1-10 heteroatoms, 5-30 membered heteroaryl having 1-10 heteroatoms, and 3-30 membered heterocyclyl having 1-10 heteroatoms, or
[0985] two R groups are optionally and independently taken together to form a covalent bond, or
[0986] two or more R groups on the same atom are optionally and independently taken together with the atom to form an optionally substituted, 3-30 membered, monocyclic, bicyclic or polycyclic ring having, in addition to the atom, 0-10 heteroatoms; or
[0987] two or more R groups on two or more atoms are optionally and independently taken together with their intervening atoms to form an optionally substituted, 3-30 membered, monocyclic, bicyclic or polycyclic ring having, in addition to the intervening atoms, 0-10 heteroatoms.

[0988] As described herein, in some embodiments, R is —H. In some embodiments, R is not —H. In some embodiments, R is optionally substituted C₁₋₁₀ aliphatic. In some embodiments, R is optionally substituted C₁₋₁₀ alkyl. In some embodiments, R is methyl. In some embodiments, R is ethyl. In some embodiments, R is isopropyl. In some embodiments, R is —CF₃. In some embodiments, R is —CH₂CF₃. In some embodiments, R is butyl. In some embodiments, R is t-butyl. In some embodiments, R is optionally substituted C₃₋₁₀ cycloaliphatic. In some embodiments, R is optionally substituted C₃₋₁₀ cycloalkyl. In some embodiments, R is optionally substituted cyclopropyl. In some embodiments, R is optionally substituted cyclobutyl. In some embodiments, R is optionally substituted cyclopentyl. In some embodiments, R is optionally substituted cyclohexyl. In some embodiments, R is optionally substituted phenyl. In some embodiments, R is phenyl. In some embodiments, R is optionally substituted 5-membered heteroaryl having 1-3 heteroatoms. In some embodiments, R is optionally substituted 5-membered heteroaryl having 1 heteroatom. In some embodiments, R is optionally substituted 6-membered heteroaryl having 1-3 heteroatoms. In some embodiments, R is optionally substituted 6-membered heteroaryl having 1 heteroatom. In some embodiments, R is optionally substituted bicyclic 8-10 membered aromatic ring having 0-5 heteroatoms. In some embodiments, R is optionally substituted bicyclic 9-membered aromatic ring having 1-5 heteroatoms. In some embodiments, R is optionally substituted bicyclic 10-membered aromatic ring having 1-5 heteroatoms. In some embodiments, R is optionally substituted bicyclic 9-membered aromatic ring having 1 heteroatom. In some embodiments, R is optionally substituted bicyclic 10-membered aromatic ring having 1 heteroatom. In some embodiments, R is optionally substituted bicyclic 10-membered aromatic ring having no heteroatom. In some embodiments, R is optionally substituted 3-10 membered heterocyclyl having 1-5 heteroatoms. In some embodiments, R is optionally substituted 5-14 membered bicyclic heterocyclyl having 1-5 heteroatoms.

[0989] In some embodiments, two R groups (or two groups that can be R, e.g., two groups each independently selected from R′, R^{a1}, R^{a2}, R^{a3}, R^{a5}, R^{RN}, etc.) are taken together with their intervening atom(s) to form an optionally substituted 3-30 membered, monocyclic, bicyclic or polycyclic ring having, in addition to the atom, 0-10 heteroatoms. In some embodiments, a formed ring is substituted. In some embodiments, a formed ring is unsubstituted. In some embodiments, a formed ring is 3-30, 3-20, 3-15, 3-10, 3-9, 3-8, 3-7, 3−6, 4-10, 4-9, 4-8, 4-7, 4−6, 5-10, 5-9, 5-8, 5-7, 5−6, or 1, 2, 3, 4, 5, 6, 7, 8, 9, 10, 11, 12, 13, 14, 15, 16, 17, 18, 19, 20, 21, 22, 23, 24, 25, 26, 27, 28, 29 or 30 membered. In some embodiments, a formed ring is 3-10 membered. In some embodiments, a formed ring is 3-7 membered. In some embodiments, a formed ring is 4-10 membered. In some embodiments, a formed ring is 4-7 membered. In some embodiments, a formed ring is 5-10 membered. In some embodiments, a formed ring is 5-7 membered. In some embodiments, a formed ring is 3-membered. In some embodiments, a formed ring is 4-membered. In some embodiments, a formed ring is 5-membered. In some embodiments, a formed ring is 6-membered. In some embodiments, a formed ring is 7-membered. In some embodiments, a formed ring is 8-membered. In some embodiments, a formed ring is 9-membered. In some embodiments, a formed ring is 10-membered. In some embodiments, a formed ring is monocyclic. In some embodiments, a formed ring is bicyclic. In some embodiments, a formed ring is polycyclic. In some embodiments, a formed ring has no heteroatoms in addition to the intervening atom(s). In some embodiments, a formed ring has 1-10, e.g., 1-5, 1-3, or 1, 2, 3, 4, 5, 6, 7, 8, 9, or 10 heteroatoms in addition to the intervening atom(s). In some embodiments, a formed ring is saturated. In some embodiments, a formed ring is partially unsaturated. In some embodiments, a formed ring comprises one or more aromatic ring. In some embodiments, a formed ring is bicyclic or polycyclic, and each monocyclic unit is independently 3-10 membered, saturated, partially unsaturated or aromatic and having 0-5 heteroatoms. In some embodiments, each heteroatom is independently selected from nitrogen, oxygen and sulfur.

[0990] In some embodiments, a group that can be R, e.g., R′, R^{a1}, R^{a2}, R^{a3}, R^{a5}, R^{RN}, etc., is R as described herein. Those skilled in the art appreciate that embodiments described for one group that can be R may also be utilized for another group that can be R to the extent that such embodiments fall within the definition of R.

[0991] In some embodiments, the present disclosure provides compounds having the structure of

[chemical structure]

or a salt thereof, wherein:
[0992] each of m and n is independently 1, 2, 3, or 4;
[0993] L^{RN} is L;
[0994] R^{RN} is R; and
[0995] R^{a5} is R′.

[0996] In some embodiments, m is 1. In some embodiments, m is 2. In some embodiments, m is 3. In some embodiments, m is 4.

[0997] In some embodiments, n is 1. In some embodiments, n is 2. In some embodiments, n is 3. In some embodiments, n is 4.

[0998] In some embodiments, L^{RN} is —CH₂—, —CO—, or —SO₂—. In some embodiments, L^{RN} is —CH₂—. In some embodiments, L^{RN} is —CO—. In some embodiments, L^{RN} is —SO₂—. In some embodiments, L^{RN} is optionally substituted bivalent C₁₋₄ alkylene. In some embodiments, L^{RN} is optionally substituted bivalent linear C₁₋₄ alkylene. In some embodiments, L^{RN} is —CH₂—CH₂—. In some embodiments, L^{RN} is —CH₂—CH₂—CH₂—. In some embodiments, L^{RN} is —C(CH₃)—.

[0999] In some embodiments, R^{RN} is R as described herein. In some embodiments, R^{RN} is C₁₇ alkyl or heteroalkyl having 1-4 heteroatoms, wherein the alkyl or heteroalkyl is optionally substituted with one or more groups independently selected from halogen, a C₅₋₆ aromatic ring having 0-4 heteroatoms, and an optionally substituted 3-10 membered cycloalkyl or heteroalkyl ring having 1-4 heteroatoms.

[1000] In some embodiments, R (e.g., R^{RN}, R′, etc.) is optionally substituted aliphatic, e.g., C₁-10 aliphatic. In some embodiments, R is optionally substituted alkyl, e.g., C₁₋₁₀ alkyl. In some embodiments, R is optionally substituted cycloalkyl, e.g., C₁₋₁₀ cycloalkyl. In some embodiments, R is optionally substituted aryl. In some embodiments, R is optionally substituted heterocyclyl. In some embodiments, R is optionally substituted heteroaryl. In some embodiments, is methyl. In some embodiments, R is —CF₃. In some embodiments, R is ethyl. In some embodiments, R is

[chemical structure]

In some embodiments, R is phenyl. In some embodiments, R is pentafluorophenyl. In some embodiments, R is pyridinyl.

[1001] In some embodiments, one or more R^{a5} are independently —H. In some embodiments, one or more R^{a5} are independently optionally substituted C₁₋₆ alkyl. In some embodiments, each R^{a5} is —H.

[1002] In some embodiments, -L^{RN}-R^{RN} is R, and is taken together with a R^{a5} and their intervening atoms to form an optionally substituted, 3-30 membered, monocyclic, bicyclic or polycyclic ring having, in addition to the intervening atoms, 0-10 heteroatoms.

[1003] As described in the present disclosure, various rings, including those in various moieties (e.g., R or various groups that can be R, various bivalent rings such as those in -Cy-) and those formed by two entities (e.g., two groups that are or can be R) taken together with their intervening forms, can be various sizes, e.g., 3-30. In some embodiments, a ring is 3-30-membered. In some embodiments, a ring is 3-20 membered. In some embodiments, a ring is 3-10 membered. In some embodiments, a ring is e.g., 3, 4, 5, 6, 7, 8, 9, or 10-membered. In some embodiments, a ring is 3-membered. In some embodiments, a ring is 4-membered. In some embodiments, a ring is 5-membered. In some embodiments, a ring is 6-membered. In some embodiments, a ring is 7-membered. In some embodiments, a ring is 8-membered. In some embodiments, a ring is 9-membered. In some embodiments, a ring is 10-membered. In some embodiments, a ring is substituted (in addition to potential groups already drawn out in formulae). In some embodiments, a ring is not substituted. In some embodiments, a ring is saturated. In some embodiments, a ring is partially unsaturated. In some embodiments, a ring is aromatic. In some embodiments, a ring comprise one or more, e.g., 1-5, heteroatoms. In some embodiments, one or more heteroatoms are oxygen. In some embodiments, one or more heteroatoms are nitrogen. In some embodiments, one or more heteroatoms are sulfur. In some embodiments, a ring is a cycloaliphatic, e.g., cycloalkyl ring. In some embodiments, a ring is a heterocycloaliphatic, e.g., heterocycloalkyl ring. In some embodiments, a ring is an aryl ring. In some embodiments, a ring is a heteroaryl ring. In some embodiments, a ring is a heteroaryl ring. In some embodiments, a ring is monocyclic. In some embodiments, a ring is bicyclic or polycyclic. In some embodiments, each monocyclic unit in a ring is independently an optionally substituted, 3-10 membered (e.g., 3, 4, 5, 6, 7, 8, 9, or 10-membered), saturated, partially unsaturated or aromatic ring having 0-5 heteroatoms.

[1004] As described herein, in some embodiments, a heteroatom is selected from nitrogen, oxygen, sulfur, silicon and phosphorus. As described herein, in some embodiments, a heteroatom is selected from nitrogen, oxygen, and sulfur.

[1005] In some embodiments, R^{a1} is —H. In some embodiments, R^{a1} is optionally substituted C₁₋₆ alkyl. In some embodiments, R^{a1} are taken together with another group, e.g., R^{a3} and their intervening atoms to form an optionally substituted ring as described herein.

[1006] In some embodiments, —C(O)R^{PC} is a protected carboxylic acid group. In some embodiments, —C(O)R^{PC} is an activated carboxylic acid group. Those skilled in the art will appreciate that various groups are available for protecting/activating carboxyl groups, including various groups that are useful in peptide synthesis, and can be utilized in accordance with the present disclosure. In some embodiments, —C(O)R^{PC} is an ester. In some embodiments, —C(O)R^{PC} is an activated ester for synthesis. In some embodiments, —C(O)R^{C} is —C(O)OR′. In some embodiments, R′ is R. In some embodiments, R′ is optionally substituted C₁₋₁₀ aliphatic. In some embodiments, R′ optionally substituted phenyl. In some embodiments, R′ is pentafluorophenyl. In some embodiments, R′ is

[chemical structure]

[1007] In some embodiments, —C(O)R^{PC} is —COOH.

[1008] In some embodiments, —C(O)R^{PS} is a protected carboxylic acid group. In some embodiments, —C(O)R^{PS} is an activated carboxylic acid group if it is to be reacted with another moiety. Those skilled in the art will appreciate that various groups are available for protecting/activating carboxyl groups, including various groups that are useful in peptide synthesis, and can be utilized in accordance with the present disclosure. In some embodiments, —C(O)R^{PS} is an ester. In some embodiments, —C(O)R^{PS} is an ester. In some embodiments, —C(O)R^{PS} is —C(O)OR′. In some embodiments, R′ is R. In some embodiments, R is optionally substituted C₁₋₁₀ aliphatic. In some embodiments, R optionally substituted phenyl. In some embodiments, R is optionally substituted t-Bu. In some embodiments, R is t-Bu. In some embodiments, R is benzyl. In some embodiments, R is allyl. In some embodiments, —C(O)R^{PC} is a protected carboxylic acid group that is compatible with peptide synthesis (e.g., Fmoc-based peptide synthesis). In some embodiments, —C(O)R^{PC} is a protected carboxylic acid group which is orthogonal to —C(O)R^{PC} and R^{PA}, and remains intact when —C(O)R^{PC} and/or N(R^{PA})(R^{a1}) are protected, deprotected, and/or reacted (e.g., in peptide synthesis such as Fmoc-based peptide synthesis). In some embodiments, —C(O)R^{PC} is deprotected at a late stage during synthesis, e.g., after a peptide backbone is or is largely constructed such that an unprotected side chain —COOH does not impact synthesis.

[1009] In some embodiments, —C(O)R^{PC} is —COOH.

[1010] As described above, R^{PA} is —H or an amino protecting group. In some embodiments, R^{PA} is —H. In some embodiments, R^{PA} is an amino protecting group. In some embodiments, R^{PA} is an amino protecting group suitable for peptide synthesis. In some embodiments, R^{PA} is —C(O)—O—R, wherein R is optionally substituted

[chemical structure]

In some embodiments, R^{PA} is -Fmoc. In some embodiments, R^{PA} is —Cbz. In some embodiments, R^{PA} is —Boc.

[1011] In some embodiments, R^{PS} is a protecting group orthogonal to R^{PA}. In some embodiments, R^{PS} is a protecting group orthogonal to R^{PC}. In some embodiments, R^{PS} is compatible with peptide synthesis. In some embodiments, R^{PS} is optionally substituted C₁₋₆ aliphatic. In some embodiments, R^{PS} is t-butyl.

[1012] In some embodiments, R^{PS} is —S-L-R′, wherein each variable is independently as described herein. In some embodiments, L is optionally substituted —CH₂—. In some embodiments, L is —CH₂—. In some embodiments, R^{PS} is —S—CH₂—R′, wherein R′ is as described herein. In some embodiments, R′ is R as described herein. In some embodiments, R is optionally substituted C₆₋₃₀ aryl. In some embodiments, R is optionally substituted C₆₋₁₀ aryl. In some embodiments, R is optionally substituted phenyl. In some embodiments, R is phenyl. In some embodiments, R is substituted phenyl wherein one or more substituents are independently alkoxy. In some embodiments, R is 2, 4, 6-trimethoxyphenyl. In some embodiments, R is optionally substituted 5-30 membered heteroaryl having 1-10 heteroatoms. In some embodiments, R is optionally substituted 5-10 membered heteroaryl having 1-4 heteroatoms. In some embodiments, R is optionally substituted 5-membered heteroaryl having 1-4 heteroatoms. In some embodiments, R^{PS} is —S—CH₂-Cy-R′, wherein the —CH₂— is optionally substituted, and -Cy- is as described herein. In some embodiments, R^{PS} is —S—CH₂-Cy-O—R′, wherein the —CH₂— is optionally substituted, and -Cy- is as described herein. In some embodiments, -Cy- is an optionally substituted aromatic ring. In some embodiments, -Cy- is optionally substituted phenylene. In some embodiments, -Cy- is 2, 6-dimethoxy-1, 4-phenylene. In some embodiments, -Cy- is 2, 4, 6-trimethoxy-1, 3-phenylene. In some embodiments, R^{PS} is

[chemical structure]

In some embodiments, R^{PS} is —SH.

[1013] In some embodiments, R^{a2} is

[chemical structure]

In some embodiments, R^{a2} is

[chemical structure]

In some embodiments, R^{a2} is

[chemical structure]

In some embodiments, R^{a2} is

[chemical structure]

In some embodiments, —C(R^{a2})(R^{a3})— is

[chemical structure]

[1014] In some embodiments, a provided compound, e.g., an amino acid is selected from:

[chemical structure]

[1015] In some embodiments, R^{a2} is R^{a2} in a compound described above (a non-hydrogen group attached to an alpha carbon).

[1016] In some embodiments, the present disclosure provides compounds having the structure of:

[chemical structure]

or a salt thereof, wherein:
[1017] Ring A is an optionally substituted 3-10 membered ring;
[1018] n is 0−6;
[1019] m is 0−6.

[1020] In some embodiments, m is 0. In some embodiments, m is 1−6.

[1021] In some embodiments, the present disclosure provides compounds having the structure of:

[chemical structure]

or a salt thereof, wherein:
[1022] Ring A is an optionally substituted 3-10 membered ring;
[1023] n is 0−6; and
[1024] m is 0−6.

[1025] In some embodiments, m is 0. In some embodiments, m is 1−6.

[1026] In some embodiments, the present disclosure provides compounds having the structure of:

[chemical structure]

or a salt thereof, wherein:
[1027] Ring A is an optionally substituted 3-10 membered ring; and
[1028] n is 0−6.

[1029] In some embodiments, n is 0. In some embodiments, n is 1. In some embodiments, n is 2. In some embodiments, n is 3. In some embodiments, n is 4. In some embodiments, n is 5. In some embodiments, n is 6. In some embodiments, n is 0, 1, or 2.

[1030] In some embodiments, m is 0. In some embodiments, m is 1. In some embodiments, m is 2. In some embodiments, m is 3. In some embodiments, m is 4. In some embodiments, m is 5. In some embodiments, m is 6. In some embodiments, m is 1, 2, or 3.

[1031] In some embodiments, Ring A is a ring as described herein. In some embodiments, Ring A is 3-membered. In some embodiments, Ring A is 4-membered. In some embodiments, Ring A is 5-membered. In some embodiments, Ring A is 6-membered. In some embodiments, Ring A is 7-membered. In some embodiments, Ring A is 8-membered. In some embodiments, Ring A is 9-membered. In some embodiments, Ring A is 10-membered. In some embodiments, Ring A is saturated. In some embodiments, Ring A is partially unsaturated. In some embodiments, Ring A is aromatic. In some embodiments, Ring A has no additional heteroatoms in addition to the nitrogen atom. In some embodiments, Ring is unsubstituted. In some embodiments, Ring A is substituted with one or more halogen. In some embodiments, Ring A is substituted with one or more —F. In some embodiments, Ring A has a carbon substituted with two —F. In some embodiments, —C(O)R^{PS} is at 2′-position (N being position 1). In some embodiments, —C(O)R^{PS} is at 3′-position. In some embodiments, —C(O)R^{PS} is at 4′-position. In some embodiments, —C(O)R^{PS} is attached to a chiral center, e.g., a chiral carbon atom. In some embodiments, a chiral center is R. In some embodiments, a chiral center is S. In some embodiments, Ring A is bonded to —(CH₂)ₙ— at a chiral carbon which is R. In some embodiments, Ring A is bonded to —(CH₂)ₙ— at a chiral carbon which is S. In some embodiments, —(CH₂)ₙ— is at position 2 (the N is at position 1). In some embodiments, —(CH₂)ₙ— is at position 3 (the N is at position 1). In some embodiments, —(CH₂)ₙ— is at position 4 (the N is at position 1).

[1032] In some embodiments, Ring A is substituted. In some embodiments, substituents on Ring A are of suitable properties, e.g., volumes, for various utilizations. In some embodiments, substituents are independently selected from halogen, —R, —CF₃, —N(R)₂, —CN, and —OR, wherein each R is independently C₁₋₆ aliphatic optionally substituted with one or more —F. In some embodiments, substituents are independently selected from halogen, C₁₋₅ linear, branched or cyclic alkyl, —OR wherein R is C₁₋₄ linear, branched or cyclic alkyl, fluorinated alkyl, —N(R)₂ wherein each R is independently C₁₋₆ linear, branched or cyclic alkyl, or —CN. In some embodiments, substituents are selected from halogen, a C₅₋₆ aromatic ring having 0-4 heteroatoms, and an optionally substituted 3-10 membered cycloalkyl or heteroalkyl ring having 1-4 heteroatoms. In some embodiments, a substituent is halogen. In some embodiments, it is —F. In some embodiments, it is —Cl. In some embodiments, it is -Br. In some embodiments, it is —I. In some embodiments, a substituent is optionally substituted C₁₋₄ alkyl. In some embodiments, a substituent is C₁₋₄ alkyl. In some embodiments, it is methyl. In some embodiments, it is ethyl. In some embodiments, it is i-Pr. In some embodiments, a substituent is C₁₋₄ haloalkyl. In some embodiments, a substituent is C₁₋₄ alkyl optionally substituted with one or more —F. In some embodiments, it is —CF₃. In some embodiments, it is —CN. In some embodiments, it is —OR wherein R is optionally substituted C₁₋₄ alkyl. In some embodiments, it is —OR wherein R is C₁₋₄ alkyl. In some embodiments, it is —OR wherein R is C₁₋₄ haloalkyl. In some embodiments, it is —OR wherein R is C₁₋₄ alkyl optionally substituted with one or more —F. In some embodiments, it is —OCF₃.

[1033] In some embodiments, Ring A is or comprises an optionally substituted saturated monocyclic ring. In some embodiments, Ring A is or comprises an optionally substituted partially unsaturated monocyclic ring. In some embodiments, Ring A is or comprises an optionally substituted aromatic monocyclic ring. In some embodiments, Ring A is optionally substituted phenyl. In some embodiments, Ring A is optionally substituted 5−6 membered heteroaryl having 1-3 heteroatoms. In some embodiments, Ring A is optionally substituted 5−6 membered heteroaryl having 1-3 heteroatoms, wherein at least one heteroatom is nitrogen. In some embodiments, Ring A is an optionally substituted 8-10 membered bicyclic ring having 1−6 heteroatoms. In some embodiments, Ring A is an optionally substituted 8-10 membered bicyclic aromatic ring having 1−6 heteroatoms, wherein each monocyclic unit is independently an optionally 5−6 membered aromatic ring having 0-3 heteroatoms. In some embodiments, Ring A is bonded to —(CH₂)ₙ— at a carbon atom. In some embodiments, Ring A is bonded to —(CH₂)ₙ— at a nitrogen atom. In some embodiments, Ring A or -Cy- in L^{aa} is optionally substituted, and each substitute is independently selected from halogen, —R, —CF₃, —N(R)₂, —CN, and —OR, wherein each R is independently C₁₋₆ aliphatic optionally substituted with one or more —F. In some embodiments, Ring A or -Cy- in L^{aa} is optionally substituted, and each substitute is independently selected from halogen, C₁₋₅ linear, branched or cyclic alkyl, —OR wherein R is C₁₋₄ linear, branched or cyclic alkyl, fluorinated alkyl, —N(R)₂ wherein each R is independently C₁₋₆ linear, branched or cyclic alkyl, or —CN.

[1034] In some embodiments, Ring A is optionally substituted phenyl. In some embodiments, the present disclosure provides a compound of formula

[chemical structure]

or a salt thereof, wherein Ring A is optionally substituted phenyl, and each variable is as described herein.

[1035] In some embodiments, the present disclosure provides compounds having the structure of

[chemical structure]

or a salt thereof, wherein each variable is independent as described herein. In some embodiments, the present disclosure provides compounds having the structure of

[chemical structure]

or a salt thereof, wherein each variable is independent as described herein.

[1036] In some embodiments, a compound is selected from:

[chemical structure]

[chemical structure]

[chemical structure]

[1037] In some embodiments, the present disclosure provides a compound of formula

[chemical structure]

or a salt thereof, wherein Ring A is optionally substituted phenyl, and each variable is as described herein. In some embodiments, a compound is selected from:

[chemical structure]

[1038] In some embodiments, Ring A is an optionally substituted 5- or 6-membered heteroaryl having 1-4 heteroatoms. In some embodiments, a provided compound has the structure of

[chemical structure]

wherein Z is carbon or a heteroatom, Ring Het is an optionally substituted 5- or 6-membered heteroaryl having 1-4 heteroatoms, and each other variable is independently as described herein. In some embodiments, a provided compound is selected from:

[chemical structure]

[1039] In some embodiments, Ring A is a 8-10 membered bicyclic aryl or a heteroaryl ring having 1-5 heteroatoms. In some embodiments, Ring A is a 10-membered bicyclic aryl ring. In some embodiments, Ring A is a 8-membered bicyclic heteroaryl ring having 1-5 heteroatoms. In some embodiments, Ring A is a 9-membered bicyclic heteroaryl ring having 1-5 heteroatoms. In some embodiments, Ring A is a 10-membered bicyclic heteroaryl ring having 1-5 heteroatoms. In some embodiments, Ring A is an optionally substituted 5- or 6-membered heteroaryl having 1-4 heteroatoms.

[1040] In some embodiments, a provided compound has the structure of

[chemical structure]

wherein each of Ring r1 and r2 is independently an optionally substituted 5- or 6-membered aryl or heteroaryl ring having 1-4 heteroatoms, and each other variable is independently as described herein. In some embodiments, a provided compound has the structure of

[chemical structure]

wherein Z is carbon or a heteroatom, each of Ring r1 and r2 is independently an optionally substituted 5- or 6-membered aryl or heteroaryl ring having 1-4 heteroatoms, and each other variable is independently as described herein. In some embodiments, a provided compound is selected from:

[chemical structure]

[1041] In some embodiments, the present disclosure provides a compound of structure

[chemical structure]

or a salt thereof. In some embodiments, —C(O)R^{PS} is —C(O)—OtBu. In some embodiments, the present disclosure provides a compound of structure

[chemical structure]

or a salt thereof, wherein each variable is independently as described herein.

[1042] In some embodiments, a provided compound is selected from:

[chemical structure]

[chemical structure]

[chemical structure]

[1043] In some embodiments, the present disclosure provides compounds having the structure of

[chemical structure]

or a salt thereof, wherein each variable is independently as described herein. In some embodiments, the present disclosure provides compounds having the structure of

[chemical structure]

or a salt thereof, wherein each variable is independently as described herein.

[1044] In some embodiments, a provided compound is selected from:

[chemical structure]

[1045] In some embodiments, a provided compound is an amino acid. In some embodiments, a provided compound is a protected amino acid. In some embodiments, a provided compound is a protected and/or activated amino acid. In some embodiments, a provided compound is suitable for

[1046] In some embodiments, a ring moiety of, e.g., -Cy-, R (including those formed by R groups taken together), etc. is monocyclic. In some embodiments, a ring moiety is bicyclic or polycyclic. In some embodiments, a monocyclic ring is an optionally substituted 3-10 (3, 4, 5, 6, 7, 8, 9, or 10, 3-8, 3-7, 4-7, 4−6, 5−6, etc.) membered, saturated, partially unsaturated or aromatic ring having 0-5 heteroatoms. In some embodiments, each monocyclic ring unit of a bicyclic or polycyclic ring moiety is independently an optionally substituted 3-10 (3, 4, 5, 6, 7, 8, 9, or 10, 3-8, 3-7, 4-7, 4−6, 5−6, etc.) membered, saturated, partially unsaturated or aromatic ring having 0-5 heteroatoms.

[1047] In some embodiments, each heteroatom is independently selected from oxygen, nitrogen, sulfur, phosphorus and silicon. In some embodiments, each heteroatom is independently selected from oxygen, nitrogen, and sulfur.

[1048] In some embodiments, L^{a1} is a covalent bond. In some embodiments, a compound of formula PA is of the structure NH(R^{a1})—C(R^{a2})(R^{a3})-L^{a2}-COOH.

[1049] In some embodiments, L^{a2} is a covalent bond. In some embodiments, a compound of formula PA is of the structure NH(R^{a1})—C(R^{a2})(R^{a3})-L^{a2}-COOH.

[1050] In some embodiments, L^{a1} is a covalent bond and L^{a2} is a covalent bond. In some embodiments, a compound of formula PA is of the structure NH(R^{a1})—C(R^{a2})(R^{a3})—COOH.

[1051] In some embodiments, an amino acid is suitable for stapling. In some embodiments, an amino acid comprises a terminal olefin.

[1052] In some embodiments, an amino acid has the structure of NH(R^{a1})-L^{a1}-C(-L^{aa}-COOH)(R^{a3})-L^{a2}-COOH, or a salt thereof, wherein each variable is independently as described in the present disclosure. In some embodiments, L^{aa} is -L^{am1}-N(R′)-L^{am2}-, wherein each variable is as described herein. In some embodiments, each of L^{am1} and L^{am2} is optionally substituted bivalent C₁₋₆ aliphatic. In some embodiments, each of L^{am1} and L^{am2} is bivalent C₁₋₆ aliphatic. In some embodiments, each of L^{am1} and L^{am2} is optionally substituted bivalent C₁₋₆ alkyl. In some embodiments, each of L^{am1} and L^{am2} is bivalent C₁₋₆ alkyl. In some embodiments, each of L^{am1} and L^{am2} is optionally substituted bivalent linear C₁₋₆ alkyl. In some embodiments, each of L^{am1} and L^{am2} is bivalent linear C₁₋₆ alkyl. In some embodiments, L^{am1} is —CH₂—. In some embodiments, L^{am2} is a covalent bond. In some embodiments, L^{am2} is —CH₂—. In some embodiments, both L^{am1}and L^{am2} are —CH₂—. In some embodiments, L^{am1} is —CH₂— and L^{am2} is a covalent bond. In some embodiments, —N(R′)— is —N(Et)-. In some embodiments, —N(R′)— is —N(CH₂CF₃)—. In some embodiments, L^{aa} is -L^{am1}-Cy-L^{am2}-, wherein each variable is as described herein. In some embodiments, -Cy- is optionally substituted phenyl. In some embodiments, -Cy- is optionally substituted 5−6 membered heteroaryl having 1-4 heteroatoms.

[1053] In some embodiments, a compound is

[chemical structure]

(2COOHF) or a salt thereof. In some embodiments, a compound is

[chemical structure]

(3COOHF) or a salt thereof. In some embodiments, a compound is

[chemical structure]

(TfeGA) or a salt thereof. In some embodiments, a compound is

[chemical structure]

(EtGA) or a salt thereof. In some embodiments, a compound is

[chemical structure]

or a salt thereof. In some embodiments, a compound is

[chemical structure]

or a salt thereof. In some embodiments, a compound is

[chemical structure]

or a salt thereof. In some embodiments, a compound is

[chemical structure]

or a salt thereof. In some embodiments, a compound is

[chemical structure]

or a salt thereof. In some embodiments, a compound is

[chemical structure]

or a salt thereof. Among other things, such compounds may be utilized as amino acid residues in peptides including stapled peptides.

[1054] In some embodiments, the present disclosure provides a compound, e.g., a peptide, comprising a residue of a compound of formula PA or a salt form thereof. In some embodiments, a residue has the structure of —N(R^{a1})-L^{a1}-C(R^{a2})(R^{a3})-L^{a2}-C(O)— or a salt form thereof, wherein each variable is independently as described herein. In some embodiments, a residue has the structure of —N(R^{a1})-L^{a1}-C(-L^{aa}-COOH)(R^{a1})-L^{a2}-C(O)— or a salt form thereof, wherein each variable is independently as described herein. For example, in some embodiments, a residue is

[chemical structure]

or a salt form thereof. In some embodiments, a residue is

[chemical structure]

or a salt form thereof. In some embodiments, a residue is

[chemical structure]

or a salt form thereof. In some embodiments, a residue is

[chemical structure]

or a salt form thereof. In some embodiments, a residue is

[chemical structure]

or a salt form thereof. In some embodiments, a residue is

[chemical structure]

or a salt form thereof. In some embodiments, a residue is

[chemical structure]

or a salt form thereof. In some embodiments, a residue is

[chemical structure]

or a salt form thereof. In some embodiments, a residue is

[chemical structure]

or a salt form thereof.

[1055] In some embodiments, an amino acid, or a structure moiety of an amino acid or an agent (e.g., a peptide), is selected from below. Brackets indicate that a moiety is attached at R₃ position of an amino acid, for instance, for a Lys with a bracket moiety

[chemical structure]

a bracket moiety would replace R₃ (when there is no bracket preceding an amino acid, e.g., Lys, then R₃ is hydrogen). For a bracket structure, R or R₁ indicate a moiety connected to the bracket structure (for

[chemical structure]

R would be

[chemical structure]

For example, a [1NapPr]Lys residue has the structure of

[chemical structure]

### ([1NaPr] is

[chemical structure]

R₁ is the N-term (and connects to the carboxylate of the previous amino acid residue, or a N-terminal cap, or is —H for an amino acid). R₂ is the C-term (and connects to the N-term of the next amino acid residue, or a C-terminal group, or is —OH for an amino acid). R₃ indicates a potential bracket moiety (or is H if no moiety is indicated). Typically, after linear peptide synthesis, the terminal olefins of all residues are linked by ring-closing metathesis.

TABLE A-IV
Certain useful compounds or moieties.

| Compound/ | |
|---|---|
| Bracket Moiety | Structure |
| [1Napc] | [chemical structure] |
| [1NapPr] | [chemical structure] |
| [2Napc] | [chemical structure] |
| [22PhPr] | [chemical structure] |
| [35CF3PhPr] | [chemical structure] |
| [4MePipBz] | [chemical structure] |
| [Acryl] | [chemical structure] |
| [AdamantC] | [chemical structure] |
| [AdamantPro] | [chemical structure] |
| [AzAc] | [chemical structure] |
| [Bn] | [chemical structure] |
| [Bua] | [chemical structure] |
| [FAM6Ppg][1TriAc] | [chemical structure] |
| [FAM6Ppg][p1TB] | [chemical structure] |
| [iPr] | [chemical structure] |
| [Me2NCBz] | [chemical structure] |
| [Me3AdamantC] | [chemical structure] |
| [MeBipipAc] | [chemical structure] |
| [MeMorphBz] | [chemical structure] |
| [MePipAc] | [chemical structure] |
| [MeSO2] | [chemical structure] |
| [MorphAc] | [chemical structure] |
| [mPEG2] | [chemical structure] |
| [mPEG4] | [chemical structure] |
| [mPEG6] | [chemical structure] |
| [mPEG8] | [chemical structure] |
| AsnR | [chemical structure] |
| [NHCyBu] | [chemical structure] |
| [NHCyHe] | [chemical structure] |
| [NHCyPr] | [chemical structure] |
| [NHEt] | [chemical structure] |
| [NHiPr] | [chemical structure] |
| [NHMe] | [chemical structure] |
| [NHnPr] | [chemical structure] |
| [Oct] | [chemical structure] |
| [Pfbn] | [chemical structure] |
| [PropynPEG1] | [chemical structure] |
| [PropynPEG2] | [chemical structure] |
| [PropynPEG3] | [chemical structure] |
| [PropynPEG4] | [chemical structure] |
| [Tf] | [chemical structure] |
| [Tfb] | [chemical structure] |
| [Tfp] | [chemical structure] |
| 1AcAW | [chemical structure] |
| 1meH | [chemical structure] |
| 1MeW | [chemical structure] |
| 1NapA | [chemical structure] |
| 23FF | [chemical structure] |
| 2BrF | [chemical structure] |
| 2CBMF | [chemical structure] |
| 2ClF | [chemical structure] |
| 2CNF | [chemical structure] |
| 2COOHF | [chemical structure] |
| 2F3MeF | [chemical structure] |
| 2FF | [chemical structure] |
| 2FurA | [chemical structure] |
| 2MeF | [chemical structure] |
| 2NapA | [chemical structure] |
| 2NO2F | [chemical structure] |
| 2OMeF | [chemical structure] |
| 2pyrA | [chemical structure] |
| 2Thi | [chemical structure] |
| 345FF | [chemical structure] |
| 34FF | [chemical structure] |
| 34OMeF | [chemical structure] |
| 35FF | [chemical structure] |
| 3CBMF | [chemical structure] |
| 3ClF | [chemical structure] |
| 3CNF | [chemical structure] |
| 3COOHF | [chemical structure] |
| 3F3MeF | [chemical structure] |
| 3FF | [chemical structure] |
| 3MeF | [chemical structure] |
| 3meH | [chemical structure] |
| 3OMeF | [chemical structure] |
| 3pyrA | [chemical structure] |
| 3Thi | [chemical structure] |
| 4AmPhe | [chemical structure] |
| 4CBMF | [chemical structure] |
| 4ClF | [chemical structure] |
| 4CNF | [chemical structure] |
| 4COOHF | [chemical structure] |
| 4F3MeF | [chemical structure] |
| 4FF | [chemical structure] |
| 4MeF | [chemical structure] |
| 4pyrA | [chemical structure] |
| 4Thz | [chemical structure] |
| 4TriA | [chemical structure] |
| 5CF3W | [chemical structure] |
| 5ClW | [chemical structure] |
| 5CpW | [chemical structure] |
| 5FW | [chemical structure] |
| 5MeOW | [chemical structure] |
| 6AmHex | [chemical structure] |
| 6AzHex | [chemical structure] |
| 6ClW | [chemical structure] |
| 6F1NapA | [chemical structure] |
| 7F1NapA | [chemical structure] |
| 7FW | [chemical structure] |
| Aad | [chemical structure] |
| Abu | [chemical structure] |
| Aib | [chemical structure] |
| aIle | [chemical structure] |
| Alaol | [chemical structure] |
| aMeDF | [chemical structure] |
| aMeW | [chemical structure] |
| Az | [chemical structure] |
| B5 | [chemical structure] |
| Bip | [chemical structure] |
| BztA | [chemical structure] |
| Cha | [chemical structure] |
| Cit | [chemical structure] |
| CypA | [chemical structure] |
| Dab | [chemical structure] |
| DaMeL | [chemical structure] |
| Dap | [chemical structure] |
| dAsn | [chemical structure] |
| dGln | [chemical structure] |
| DGlu | [chemical structure] |
| dHis | [chemical structure] |
| DipA | [chemical structure] |
| dPhe | [chemical structure] |
| dSer | [chemical structure] |
| dThr | [chemical structure] |
| EtGA | [chemical structure] |
| F3CA | [chemical structure] |
| GA | [chemical structure] |
| H2Trp | [chemical structure] |
| HF2CA | [chemical structure] |
| hLeu | [chemical structure] |
| Hleu | same as above |
| hPhe | [chemical structure] |
| Hse | [chemical structure] |
| hSe | same as above |
| hTyr | [chemical structure] |
| iPrLys | [chemical structure] |
| isoAsp | [chemical structure] |
| isoDAsp | [chemical structure] |
| Leuol | [chemical structure] |
| MeOPr | [chemical structure] |
| MeTyr | [chemical structure] |
| MorphAla | [chemical structure] |
| NdiMeButC | [chemical structure] |
| nLeu | [chemical structure] |
| NMeD | [chemical structure] |
| NMeHis | [chemical structure] |
| NMeS | [chemical structure] |
| Npg | [chemical structure] |
| npG | same as above |
| Nva | [chemical structure] |
| Pff | [chemical structure] |
| Pheol | [chemical structure] |
| Phg | [chemical structure] |
| Pic | [chemical structure] |
| PL3 | [chemical structure] |
| Prool | [chemical structure] |
| PyrS | [chemical structure] |
| PyrS1 | [chemical structure] |
| PyrS2 | [chemical structure] |
| PyrS3 | [chemical structure] |
| Qui | [chemical structure] |
| R4 | [chemical structure] |
| R5 | [chemical structure] |
| R6 | [chemical structure] |
| R7 | [chemical structure] |
| R8 | [chemical structure] |
| RbGlu | [chemical structure] |
| RdN | [chemical structure] |
| ReN | [chemical structure] |
| RgN | [chemical structure] |
| S(Ome) | [chemical structure] |
| S(Ome) | same as above |
| S10 | [chemical structure] |
| S4 | [chemical structure] |
| S5 | [chemical structure] |
| S6 | [chemical structure] |
| S7 | [chemical structure] |
| S8 | [chemical structure] |
| SbGlu | [chemical structure] |
| SdN | [chemical structure] |
| SeN | [chemical structure] |
| SgN | [chemical structure] |
| tetz | [chemical structure] |
| TfeGA | [chemical structure] |
| Throl | [chemical structure] |
| TOMe | [chemical structure] |
| WCHO | [chemical structure] |
| [2COOH4NH2Ph] | [chemical structure] |
| [2COOH4NO2Ph] | [chemical structure] |
| [2COOHPh] | [chemical structure] |
| [2Nic] | [chemical structure] |
| [2OxoPpz] | [chemical structure] |
| [3C] | [chemical structure] |
| [3Py] | [chemical structure] |
| [4AcMePip] | [chemical structure] |
| [4CF3PhAc] | [chemical structure] |
| [4F3CPip] | [chemical structure] |
| [4MePpzPip] | [chemical structure] |
| [4Pippip] | [chemical structure] |
| [4PyPip] | [chemical structure] |
| [Ac] | [chemical structure] |
| [AcPpz] | [chemical structure] |
| [Allyl] | [chemical structure] |
| [bismethoxyethylamine] | [chemical structure] |
| [Bn] | [chemical structure] |
| [CCpCO2H] | [chemical structure] |
| [CF3CO] | [chemical structure] |
| [CH2CChCO2H] | [chemical structure] |
| [CH2CCpCO2H] | [chemical structure] |
| [CH2CH2CO2H] | [chemical structure] |
| [CH2CMe2CO2H] | [chemical structure] |
| [CH2CO2H] | [chemical structure] |
| [CH2NMe2] | [chemical structure] |
| [CH2Ppz] | [chemical structure] |
| [CMe2CO2H] | [chemical structure] |
| [CyPr] | [chemical structure] |
| [Et] | [chemical structure] |
| [EtSO2Ppz] | [chemical structure] |
| [EtSSEt] | [chemical structure] |
| [EtSSHex] | [chemical structure] |
| [EtSSPh] | [chemical structure] |
| [EtSSpy] | [chemical structure] |
| [H4IAP] | [chemical structure] |
| [isoindoline] | [chemical structure] |
| [lithocholate] | [chemical structure] |
| [PEG2] | [chemical structure] |
| [Me] | R₁— |
| [Me2diaminobutane] | [chemical structure] |
| [Me2NCBz] | [chemical structure] |
| [Me2Npr] | [chemical structure] |
| [Me2NPrPip] | [chemical structure] |
| [Me3AdamantC] | [chemical structure] |
| [MeMorphBz] | [chemical structure] |
| [MePipAc] | [chemical structure] |
| [MeSO2] | [chemical structure] |
| [Morph] | [chemical structure] |
| [MorphAc] | [chemical structure] |
| [MorphCH2] | [chemical structure] |
| [MorphEt] | [chemical structure] |
| [NdiMeButC] | [chemical structure] |
| [NHBn] | [chemical structure] |
| [NHEt] | [chemical structure] |
| [NMe2] | [chemical structure] |
| [PfbGA] | [chemical structure] |
| [Pfbn] | [chemical structure] |
| [PfBz] | [chemical structure] |
| [PfPhAc] | [chemical structure] |
| [Ph] | [chemical structure] |
| [Phc] | [chemical structure] |
| [Pic] | [chemical structure] |
| [Ppz] | [chemical structure] |
| [RDMAPyr] | [chemical structure] |
| [sBu] | [chemical structure] |
| [SO2MorphCH2] | [chemical structure] |
| [Tfb] | [chemical structure] |
| [TfePpz] | [chemical structure] |
| [Tfp] | [chemical structure] |
| 2F3MeW | [chemical structure] |
| 2NH2F | [chemical structure] |
| 34ClF | [chemical structure] |
| 34MeF | [chemical structure] |
| 3Br4FF | [chemical structure] |
| 3BrF | [chemical structure] |
| 3butenyl | [chemical structure] |
| 3CBMF | [chemical structure] |
| 3CH2NMe2F | [chemical structure] |
| 3CO2PhF | [chemical structure] |
| 3SF | [chemical structure] |
| 3SO2F | [chemical structure] |
| 3TzF | [chemical structure] |
| 4BrF | [chemical structure] |
| 4ClBztA | [chemical structure] |
| 4ClW | [chemical structure] |
| 4F3COOHF | [chemical structure] |
| 4FW | [chemical structure] |
| 4pentenyl | [chemical structure] |
| 4SEF | [chemical structure] |
| 4TzF | [chemical structure] |
| 5F3Me3COOHF | [chemical structure] |
| 5hexenyl | [chemical structure] |
| 5IndA | [chemical structure] |
| 5iPr3COOHF | [chemical structure] |
| 7AzaW | [chemical structure] |
| 7ClBztA | [chemical structure] |
| 7FBztA | [chemical structure] |
| AcAsp | [chemical structure] |
| AcLys | [chemical structure] |
| AspE | [chemical structure] |
| AspSH | [chemical structure] |
| Az2 | [chemical structure] |
| Az3 | [chemical structure] |
| B3 | [chemical structure] |
| B4 | [chemical structure] |
| B6 | [chemical structure] |
| bMe2Asp | [chemical structure] |
| Bn30Allyl | [chemical structure] |
| BnBoroleK | [chemical structure] |
| Bnc | [chemical structure] |
| BrAc | [chemical structure] |
| BzAm2Allyl | [chemical structure] |
| BzAm3Oallyl | [chemical structure] |
| Cba | [chemical structure] |
| Cbg | [chemical structure] |
| ClAc | [chemical structure] |
| CO2Bu | [chemical structure] |
| CO2Hex | [chemical structure] |
| CO2iBu | [chemical structure] |
| CO2Me | [chemical structure] |
| CO2Ph | [chemical structure] |
| Cpg | [chemical structure] |
| CyLeu | [chemical structure] |
| dAla | [chemical structure] |
| dIle | [chemical structure] |
| dLeu | [chemical structure] |
| F2PipAbu | [chemical structure] |
| F2PipNva | [chemical structure] |
| GA | [chemical structure] |
| GAbu | [chemical structure] |
| GlnR | [chemical structure] |
| GluE | [chemical structure] |
| GluSH | [chemical structure] |
| hhLeu | [chemical structure] |
| HypBzEs3OAllyl | [chemical structure] |
| HypEs4 | [chemical structure] |
| HypEs5 | [chemical structure] |
| HypPAc3OAllyl | [chemical structure] |
| Me2Asn | [chemical structure] |
| Me2Gln | [chemical structure] |
| MeAsn | [chemical structure] |
| MeGln | [chemical structure] |
| MePpzAbu | [chemical structure] |
| MePpzAsn | [chemical structure] |
| MePpzNva | [chemical structure] |
| MePro | [chemical structure] |
| Met2O | [chemical structure] |
| MorphAbu | [chemical structure] |
| MorphAsn | [chemical structure] |
| MorphGln | [chemical structure] |
| MorphNva | [chemical structure] |
| NMebAla | [chemical structure] |
| Npa | [chemical structure] |
| PAc3OAllyl | [chemical structure] |
| ProAm5 | [chemical structure] |
| ProAm6 | [chemical structure] |
| ProBzAm3OAllyl | [chemical structure] |
| ProPAc3OAllyl | [chemical structure] |
| PropynOH | [chemical structure] |
| ProSAm3 | [chemical structure] |
| PyrR | [chemical structure] |
| PyrR2 | [chemical structure] |
| PyrS4 | [chemical structure] |
| R2COOPipA | [chemical structure] |
| R3COOPipA | [chemical structure] |
| RbMe2NapA | [chemical structure] |
| RbMeBztA | [chemical structure] |
| RbOHAsp | [chemical structure] |
| S2COOPipA | [chemical structure] |
| S3COOPipA | [chemical structure] |
| sAla | [chemical structure] |
| Sar | [chemical structure] |
| SbMe2NapA | [chemical structure] |
| SbMeBztA | [chemical structure] |
| SeNc5 | [chemical structure] |
| SPip1 | [chemical structure] |
| SPip2 | [chemical structure] |
| SPip3 | [chemical structure] |
| ThioPro | [chemical structure] |
| TriAzDap | [chemical structure] |
| TriAzDab | [chemical structure] |
| TriAzLys | [chemical structure] |
| TriAzdLys | [chemical structure] |

[1057] In some embodiments, a compound has a structure selected from the table above, wherein R₁ is —OH. In some embodiments, a compound has a structure selected from the table above, wherein R₁ is an amino protection group, e.g., Fmoc, tBoc, etc. In some embodiments, a compound has a structure selected from the table above, wherein R₁ is an amino protecting group, e.g., Fmoc, tBoc, etc., and R₂ is —OH, or —COR₂ is an optionally substituted, protected or activated carboxyl group. In some embodiments, R₂ is —OH. In some embodiments, an amino acid residue has a structure selected from the table above, wherein each of R₁ and R₂ independently represents a connection site (e.g., for structure

[chemical structure]

the residue is of the structure

[chemical structure]

In some embodiments, an agent, a peptide or a stapled peptide comprises such an amino acid residue.

[1058] In some embodiments, a peptide comprises one or more residues of amino acids selected from the Table above. In some embodiments, a peptide comprises one or more residues of TfeGA. In some embodiments, a peptide comprises one or more residues of 2COOHF. In some embodiments, a peptide comprises one or more residues of 3COOHF.

[1059] Among other things, the present disclosure provides peptides, including stapled peptides, comprising residues of amino acids described herein. In some embodiments, the present disclosure provides various methods comprising utilizing amino acids, optionally protected and/or activated, as described herein. In some embodiments, the present disclosure provides methods for preparing peptides, comprising utilizing amino acids, typically protected and/or activated, as described herein. For example, in some embodiments, various amino groups are Fmoc protected for peptide synthesis (particularly for forming backbone peptide bonds). In some embodiments, various side chain carboxylic acid groups are t-Bu protected (—C(O)—O-tBu).

[1060] In some embodiments, the present disclosure provides methods, comprising replacing one or more acidic amino acid residues, e.g., Asp, Glu, etc., in a first compound, each independently with a provided amino acid residue, e.g., TfeGA, 2COOHF, 3COOHF, etc., to provide a second compound. In some embodiments, each of the first and second compounds is independently or independently comprises a peptide. In some embodiments, a second compound provides improved properties and/or activities (e.g., lipophilicity, Log D, etc.) compared to a first compound. In some embodiments, a second compound provides, in addition to improved properties such as lipophilicity, one or more comparable or improved other properties and/or activities (e.g., solubility and/or target binding) compared to a first compound.

[1061] In some embodiments, an agent, e.g., a peptide, a stapled peptide, a stitched peptide, etc., is less than about 5000 Daltons in mass. In some embodiments, an agent is greater than or equal to about 900 Daltons and less than about 5000 Daltons in mass. In some embodiments, an agent is greater than or equal to about 1500 Daltons and less than about 5000 Daltons in mass. In some embodiments, an agent is greater than or equal to about 2000 Daltons and less than about 5000 Daltons in mass. In some embodiments, an agent is greater than or equal to about 2500 Daltons and less than about 5000 Daltons in mass. In some embodiments, an agent is greater than or equal to about 1000 Daltons and less than about 3000 Daltons in mass. In some embodiments, an agent is greater than or equal to about 1500 Daltons and less than about 3000 Daltons in mass. In some embodiments, an agent is greater than or equal to about 1500 Daltons and less than about 2500 Daltons in mass. In some embodiments, an agent is greater than or equal to about 1600 Daltons and less than about 2200 Daltons in mass. In some embodiments, the agent is no more than about 900 Daltons in mass. In some embodiments, an agent is no more than about 500 Daltons in mass. In some embodiments, an agent is no more than about 300 Daltons in mass. In some embodiments, an agent is no more than about 200 Daltons in mass.

### Characterization

[1062] In some embodiments, agents, e.g., peptides, are characterized with respect to, for example, one or more characteristics such as binding characteristics—e.g., with respect to a particular target of interest (e.g., beta-catenin or a portion thereof), stability characteristics, for example in solution or in dried form, cell permeability characteristics, solubility, lipophilicity, etc.

[1063] In some embodiments, a binding characteristic may be or comprise specificity, affinity, on-rate, off-rate, etc, optionally under (or over a range of) specified conditions such as, for example, concentration, temperature, pH, cell type, presence or level of a particular competitor, etc.

[1064] As will be appreciated by those skilled in the art, assessments of characteristics as described herein may involve comparison with an appropriate reference (e.g., a positive or negative control) which may, in some embodiments, be a contemporaneous reference or, in some embodiments, a historical reference.

[1065] In some embodiments, desirable characteristics may be, for example: binding to a desired target (e.g., a dissociation constant (K_{D}) of at least less than about 1 μM, and preferably a K_{D} of less than about 50 nM); cell penetration (e.g., as measured by fluorescence-based assays or mass spectrometry of cellular fractions, etc.); solubility (e.g., soluble at less than about 1000 uM agent, or soluble at less than about 500 uM agent, or soluble at less than about 100 uM agent, or less than about 50 uM, or less than about 35 uM); activity (e.g., modulating one or more functions of a target, which may be assessed in a cellular reporter assay (e.g., with an IC50 of less than a concentration, e.g., less than about 1 μM, less than about 500 nM, less than about 50 nM, less than about 10 nM, etc.), an animal model (e.g., various animal models for conditions, disorders or diseases, e.g., mouse melanoma models Braf^{V600E}/Pten^{-/-} and Braf^{V600E}/Pten^{-/-}/CAT-STA) and/or a subject; stability, which may be assessed using a number of assays (e.g., in a rat pharmacokinetic study (e.g., administered via oral, iv, ip, etc.) with a terminal half-life of greater than a suitable time, e.g., 1 hour); low toxicity, which might be assessed by a number of assays (e.g., a standard ADME/toxicity assays); and/or low levels of cytotoxicity (e.g., low levels of lactate dehydrogenase (LDH) released from cells when treated at a suitable concentration, e.g., about 10 μM of a peptide). In some embodiments, an agent of the invention comprises an affinity of less than about 10 nM, for example, an IC50 of 7 nM).

[1066] In some embodiments, provided agents can bind to targets, e.g., beta-catenin, with an EC50 of no more than about 2000 nM. In some embodiments, an EC50 is no more than about 1500 nM. In some embodiments, an EC50 is no more than about 1000 nM. In some embodiments, an EC50 is no more than about 500 nM. In some embodiments, an EC50 is no more than about 300 nM. In some embodiments, an EC50 is no more than about 200 nM. In some embodiments, an EC50 is no more than about 100 nM. In some embodiments, an EC50 is no more than about 75 nM. In some embodiments, an EC50 is no more than about 50 nM. In some embodiments, an EC50 is no more than about 25 nM. In some embodiments, an EC50 is no more than about 10 nM. In some embodiments, an EC50 is no more than about 5 nM. In some embodiments, an EC50 is measured by fluorescence polarization as described in the Examples.

[1067] In some embodiments, the present disclosure provides agents, e.g., stapled peptides, with suitable solubility for various purposes. In some embodiments, solubility of provided agents, e.g., in PBS, is about or at least about 5-100 uM (e.g., about or at least about 5, 10, 15, 20, 25, 30, 40, 50, 60, 70, 80, 90, or 100 uM). In some embodiments, solubility is about or at least about 25 uM. In some embodiments, solubility is about or at least about 30 uM. In some embodiments, solubility is about or at least about 40 uM. In some embodiments, solubility is about or at least about 50 uM. In some embodiments, provided agents, e.g., stapled peptides, are protein bound in serum; in some embodiments, they are at least about 85%, 90%, or 95% protein bound in serum. In some embodiments, provided agents are over 95% protein bound in serum.

[1068] In some embodiments, provided agents can traverse a cell membrane of an animal cell. In some embodiments, provided agents can traverse a cell membrane of a human cell.

[1069] Among other things, provided agents can bind to motifs, residues, or polypeptides. In some embodiments, provided agents bind to beta-catenin. In some embodiments, a dissociation constant (K_{D}) is about 1 nM to about 1 uM. In some embodiments, a K_{D} is no more than about 1 uM. In some embodiments, a K_{D} is no more than about 500 nM. In some embodiments, a K_{D} is no more than about 250 nM. In some embodiments, a K_{D} is no more than about 100 nM. In some embodiments, a K_{D} is no more than about 50 nM. In some embodiments, a K_{D} is no more than about 25 nM. In some embodiments, a K_{D} is no more than about 10 nM. In some embodiments, a K_{D} is no more than about 5 nM. In some embodiments, a K_{D} is no more than about 1 nM. As appreciated by those skilled in the art, various technologies are available and can be utilized to measure K_{D} in accordance with the present disclosure. In some embodiments, K_{D} is measured by Surface Plasmon Resonance (SPR) as illustrated herein.

[1070] In some embodiments, provided agents binds to a polypeptide whose sequence is or comprising SEQ ID NO: 2, or a fragment thereof:

(SEQ ID NO: 2)
SVLFYAITTLHNLLLHQEGAKMAVRLAGGLQKMVALLNKTNVKFLAITTD
CLQILAYGNQESKLIILASGGPQALVNIMRTYTYEKLLWTTSRVLKVLSV
CSSNKPAIVEAGGMQALGLHLTDPSQRLVQNCLWTLRNLSDAATKQEGME
GLLGTLVQLLGSDDINVVTCAAGILSNLTCNNYKNKMMVCQVGGIEALVR
T.

[1071] In some embodiments, provided agents have one or more or all of the following interactions with beta-catenin:

Direct interactions (Italic), water mediated (bold), non-polar contacts underlined

(SEQ ID NO: 3)
LQILAYGNQESKLIILA (residue 301-317 of Uniprot
P35222 sequence)
(SEQ ID NO: 4)
SRVLKVLSVCSSN (residue 341-353 of Uniprot P35222
sequence)
(SEQ ID NO: 5)
RLVQNCLWTLRNLSDA (residue 376-391 of Uniprot
P35222 sequence)
(SEQ ID NO: 6)
LGSDDINVVTCAAGI (residue 409-423 of Uniprot P35222
sequence)

[1072] In some embodiments, an agent, e.g., a peptide, binds to beta-catenin and interacts with one or more residues that are or correspond to at least two, or at least three, or at least four, or at least five, or at least six, or at least seven, or at least eight or at least nine, or at least ten, or at least eleven, or at least twelve, or at least thirteen, or at least fourteen, or at least fifteen, or at least sixteen, or at least seventeen, or at least eighteen, or at least nineteen, or at least twenty of the following amino acid residues in SEQ ID NO: 1 at the indicated positions: A305, Y306, G307, N308, Q309, K312, K345, V346, V349, Q379, N380, L382, W383, R386, N387, D413, N415, V416, T418, and C419. In some embodiments, an agent, e.g., a peptide, binds to beta-catenin and interacts with one or more residues that are or correspond to at least two, or at least three, or at least four, or at least five, or at least six, or seven of the following amino acid residues in SEQ ID NO: 1 at the indicated positions: G307, K312, K345, W383, R386, N387, D413, and N415. In some embodiments, an agent, e.g., a peptide, binds to beta-catenin and interacts with one or more residues that are or correspond to at least two, or at least three, or at least four, or at least five, or at least six, or seven of the following amino acid residues in SEQ ID NO: 1 at the indicated positions: G307, K312, K345, W383, N387, D413, and N415.

[1073] In some embodiments, provided agents interact with beta-catenin at one or more (e.g., 1, 2, 3, 4, 5, 6, or 7) of G307, K312, K345, W383, R386, N387, D413 and N415. In some embodiments, provided agents interact with beta-catenin at one or more (e.g., 1, 2, 3, 4, 5, 6, or 7) of G307, K312, K345, W383, N387, D413 and N415. In some embodiments, provided agents interact with beta-catenin at one or both of K312 and R386. In some embodiments, provided agents interact with G307. In some embodiments, provided agents interact with K312. In some embodiments, provided agents interact with beta-catenin at one or more of K345, W383, D413 and N415. In some embodiments, provided agents interact with beta-catenin at one or more of K345 and W383. In some embodiments, provided agents interact with beta-catenin at one or more of D413 and N415. In some embodiments, provided agents interact with K312. In some embodiments, provided agents interact with K345. In some embodiments, provided agents interact with W383. In some embodiments, provided agents interact with R386. In some embodiments, provided agents interact with D413. In some embodiments, provided agents interact with N415.

[1074] In some embodiments, provided agents interact with one or more of amino acid residues that are or correspond to K312, R386, K345 and W383 of SEQ ID NO: 1. In some embodiments, provided agents interact with one or more of amino acid residues that are or correspond to K312 and R386 of SEQ ID NO: 1. In some embodiments, interaction with an amino acid residue can be assessed through mutation of such an amino acid residue (e.g., mutation of K, R, etc. to D, E, etc.).

[1075] As those skilled in the art reading the present disclosure will appreciate, in some embodiments, interactions with beta-catenin may be assessed by contacting an agent with either a full-length or a portion of beta-catenin. In some embodiments, a portion of beta-catenin comprises the interacting residues above. In some embodiments, a portion of beta-catenin is or comprises SEQ ID NO: 2. In some embodiments, a portion of beta-catenin is expressed with a tag (e.g., for purification, detection, etc.). In some embodiments, a tag is a fluorescent tag. In some embodiments, a tag is for detection. In some embodiments, a tag is for purification and detection. In some embodiments, a tag is a purification tag. In some embodiments, a tag is or comprises biotin. Many other types of tags are available in the art and can be utilized in accordance with the present disclosure.

[1076] Various technologies can be utilized for characterizing and/or assessing provided technologies (e.g., agents (e.g., various peptides), compositions, methods, etc.) in accordance with the present disclosure. As described herein, in some embodiments, a useful technology is or comprises fluorescence polarization. In some embodiments, a useful technology assesses Log P or Log D. In some embodiments, a useful technology is or comprises a CHI Log D assay. In some embodiments, a useful technology assesses solubility. In some embodiments, a useful technology is or comprises NanoBRET. In some embodiments, a useful technology is or comprises a reporter assay (e.g., DLD1 reporter assay). In some embodiments, a useful technology is or comprises alphascreen. Certain useful protocols are described in the Examples. Those skilled in the art appreciate that suitable adjustments may be made to such protocols, e.g., according to specific conditions, agents, purposes, etc.

### Production

[1077] Various technologies are known in the art for producing provided agents. For example, various technologies for preparing small molecules, peptides (including stapled peptides) may be utilized in accordance with the present disclosure. Those skilled in the art, reading the present disclosure will well appreciate which such technologies are applicable in which aspects of the present disclosure in accordance with the present disclosure.

[1078] In some embodiments, as described herein, certain stapled peptides, and in particular cysteine stapled peptides, may be provided in and/or produced by a biological system and reacting with a provided reagent, e.g., one having the structure of R^{x}-L^{s2}-R^{x}, or a salt thereof, wherein R can react with —SH groups under suitable conditions. In some embodiments, each Rₓ is a suitable leaving group. In some embodiments, each R^{x} is independently —Br.

[1079] In some embodiments, peptides are prepared on solid phase on a synthesizer using, typically, Fmoc chemistry. In some embodiments, the present disclosure provides protected and/or activated amino acids for synthesis.

[1080] In some embodiments, staples are formed by olefin metathesis. In some embodiments, a product double bond of metathesis is reduced/hydrogenated. In some embodiments, CO₂ are extruded from a carbamate moiety of a staple. In some embodiments, provided stapled peptides are further modified, and/or conjugated to other entities. Conditions and/or reagents of these reactions are widely known in the art and can be performed in accordance with the present disclosure to provide stapled peptides.

[1081] Properties and/or activities of provided stapled peptides can be readily assessed in accordance with the present disclosure, for example, through use of one or more methods described in the examples.

[1082] In some embodiments, technologies for preparing and/or assessing provided stapled peptides include those described in U.S. Pat. No. 9,617,309, US 2015-0225471, US 2016-0024153, US 2016-0215036, US2016-0244494, WO 2017/062518, etc.

[1083] In some embodiments, a provided compound, e.g., an amino acid or a protected form thereof, may be prepared utilizing the following technologies.

[1084] In some embodiments, a provide compound may be prepared using one or more or all steps described below:

[chemical structure]

[1085] Those skilled in the art will appreciate that other leaving groups can be utilized in place of —Cl for the first reaction, such as —Br, —I, —OTs, Oms, etc.

[1086] In some embodiments, a provide compound may be prepared using one or more or all steps described below:

[chemical structure]

[1087] In some embodiments, a provide compound may be prepared using one or more or all steps described below:

[chemical structure]

[1088] In some embodiments, a provide compound may be prepared using one or more or all steps described below:

[chemical structure]

[1089] In some embodiments, a provide compound may be prepared using one or more or all steps described below:

[chemical structure]

[1090] Provided compounds can be provided in high purity. In some embodiments, a provided compound is at least about 85%, 90%, 91%, 92%, 93%, 94%, 95%, 96%, 97%, 98%, or 99% pure. In some embodiments, provided compounds, e.g., amino acids optionally protected/activated, are essentially free of impurities, including stereoisomers.

### Compositions

[1091] Among other things, the present disclosure provides compositions that comprise or otherwise relate to provided agents, e.g., small molecule agents, peptide agents (e.g., stapled peptides), as described herein.

[1092] In some embodiments, provided compositions are or comprise an assay system for characterizing (and optionally including) a stapled peptide as described herein.

[1093] In some embodiments, provided compositions are pharmaceutical compositions e.g., that comprise or deliver one or more provided agents.

[1094] In some embodiments, an agent is a peptide. In some embodiments, an agent is a stapled peptide. In some embodiments, an agent comprises a detectable moiety, e.g., fluorescent moiety, radioactive moiety, biotin, etc. In some embodiments, a detectable moiety is directly detectable. In some embodiments, a detectable antibody is detected indirectly, e.g., utilizing an antibody, an agent that can reacting with a detectable moiety to form a detectable product, etc.

[1095] In some embodiments, a pharmaceutical composition comprises a provided agent and a pharmaceutically acceptable excipient (e.g., carrier).

[1096] In some embodiments, a peptide composition may include or deliver a particular form (e.g., a particular optical isomer, diastereomer, salt form, covalent conjugate form [e.g., covalently attached to a carrier moiety], etc., or combination thereof) of an agent as described herein). In some embodiments, an agent included or delivered by a pharmaceutical composition is described herein is not covalently linked to a carrier moiety.

[1097] In some embodiments, a provided therapeutic composition may comprise one or more additional therapeutic agents and/or one or more stabilizing agents and/or one or more agents that alters (e.g., extends or limits to a particular tissue, location or site) rate or extent of delivery over time.

[1098] In some embodiments, a composition is a pharmaceutical composition which comprises or delivers a provided agent (e.g., a stapled peptide) or a pharmaceutically acceptable salt thereof and a pharmaceutically acceptable excipient. In some embodiments, a composition comprises one and only stereoisomer of an agent (e.g., a stapled peptide) and/or one or more salts thereof. In some embodiments, a composition comprises two or more stereoisomers of an agent (e.g., a stapled peptide) and/or one or more salts thereof. In some embodiments, the two or more stereoisomers of an agent (e.g., a stapled peptide) or salts thereof elute as a single peak in a chromatography, e.g., HPLC.

### Uses and Applications

[1099] Provided agents and compositions can be utilized for various purposes. For example, certain compounds may be utilized as amino acids, either directly or for preparation of other compounds such as peptides. Certain agents, e.g., peptides, may be utilized to prepare stapled peptides. Certain agents that are or comprise peptides, particularly stapled peptides, and compositions thereof, are biologically active and can be utilized for various purposes, e.g., as therapeutics toward various conditions, disorders or diseases, as tools for modulating biological functions, etc.

[1100] In some embodiments, the present disclosure provides agents and compositions thereof for modulating beta-catenin functions. In some instances, beta-catenin is reported to have multiple cellular functions including regulation and coordination of cell-cell adhesion and gene transcription. In some embodiments, agents described herein may inhibit beta-catenin activity and/or level and may, for example, inhibit neoplastic growth. In some embodiments, agents described herein may activate and/or increase level of beta-catenin and may, for example, be used to treat male pattern baldness or alopecia.

[1101] It is reported that beta-catenin can interact with members of the TCF/LEF family at a TCF site on beta-catenin. In some embodiments, provided technologies can decrease, suppress or block one or more of such interactions. In some embodiments, the present disclosure provides methods for modulating an interaction between beta-catenin and its binding partner (e.g., a TCF/LEF family member) comprising contacting beta-catenin with a provided agent.

[1102] In some embodiments, binding of provided agents to beta-catenin competes or inhibits binding of another agent. In some embodiments, binding of provided agents to beta-catenin competes or inhibits binding of another agent. In some embodiments, binding of provided agents to beta-catenin competes or inhibits binding of TCF or a fragment thereof.

[1103] In some embodiments, provided agents compete with TCF7, LEF1, TCF7L1, TCF7L2, Axin1, Axin2, APC, CDH1, or CDH2, or a fragment thereof, for beta-catenin binding.

[1104] In some embodiments, provided agents interfere with interactions of TCF7, LEF1, TCF7L1, TCF7L2, Axin1, Axin2, APC, CDH1, or CDH2, or a fragment thereof, with beta-catenin.

[1105] In some embodiments, the present disclosure provides methods for modulating interactions of beta-catenin with a partner, e.g., TCF7, LEF1, TCF7L1, TCF7L2, Axin1, Axin2, APC, CDH1, or CDH2, or a fragment thereof, comprising contacting beta-catenin with a provided agent or a composition that comprises or delivers a provided agent. In some embodiments, the present disclosure provides methods for modulating interactions of beta-catenin with a partner, e.g., TCF7, LEF1, TCF7L1, TCF7L2, Axin1, Axin2, APC, CDH1, or CDH2, or a fragment thereof, comprising administering or delivering to a system comprising beta-catenin and the partner a provided agent or a composition that comprises or delivers a provided agent. In some embodiments, a system is an intro system. In some embodiments, a system is or comprises a cell, tissue or organ. In some embodiments, a system is a subject. In some embodiments, the present disclosure provides method for inhibiting cell growth, comprising administering or delivering to a population of cells an effective amount of a provided agent or a pharmaceutically acceptable salt thereof. In some embodiments, the present disclosure provides method for killing cells associated with a condition, disorder or disease (e.g., cancer), comprising administering or delivering to a population of such cells an effective amount of a provided agent or a pharmaceutically acceptable salt thereof.

[1106] In some embodiments, the present disclosure provides methods for preventing a condition, disorder or disease associated with beta-catenin (e.g., a cancer, a neurodegenerative disease, etc.), comprising administering or delivering to a subject susceptible thereto an effective amount of a provided agent or a pharmaceutically acceptable salt thereof. In some embodiments, the present disclosure provides methods for treating a condition, disorder or disease associated with beta-catenin (e.g., aberrant beta-catenin activity and/or expression level), comprising administering or delivering to a subject suffering therefrom an effective amount of a provided agent or a pharmaceutically acceptable salt thereof. In some embodiments, a provided agent is administered as a pharmaceutical composition that comprises or delivers an effective amount of a provided agent or a pharmaceutically acceptable salt thereof. In some embodiments, a condition, disorder or disease is associated with beta-catenin interaction with a partner, e.g., TCF7, LEF1, TCF7L1, TCF7L2, Axin1, Axin2, APC, CDH1, and/or CDH2. In some embodiments, a condition, disorder or disease is associated with beta-catenin with TCF. In some embodiments, a condition, disorder or disease is cancer. In some embodiments, provided agents may be administered in combination with another therapy, e.g., immunotherapy. In some embodiments, a condition, disorder, or disease is selected from cancer, cardiac disease, dilated cardiomyopathy, fetal alcohol syndrome, depression, and diabetes. In some embodiments, a condition, disorder, or disease is a heart condition, disorder, or disease. In some embodiments, a condition, disorder, or disease is cancer. In some embodiments a cancer is selected from: colon cancer, colorectal cancer, rectal cancer, prostate cancer familial adenomatous polyposis (FAP), Wilms Tumor, melanoma, hepatocellular carcinoma, ovarian cancer, endometrial cancer, medulloblastoma pilomatricomas, primary hetpatocellular carcinoma, ovarial carcinoma, breast cancer, lung cancer, glioblastoma, pliomatrixoma, medulloblastoma, thyroid tumors, and ovarian neoplasms. In some embodiments, a condition, disorder or disease is a cancer, e.g., colorectal cancer, hepatocellular cancer, melanoma, gastric cancer, bladder cancer, and endometrial cancer. In some embodiments, a cancer is colorectal cancer. In some embodiments, a cancer is hepatocellular cancer. In some embodiments, a cancer is prostate cancer. In some embodiments, a cancer is melanoma.

[1107] Various technologies can be utilized in accordance with the present disclosure to formulate, distribute, administer or deliver provided technologies such as agents, peptides, compounds, compositions, etc. For example, in some embodiments, administration may be ocular, oral, parenteral, topical, etc. In some particular embodiments, administration may be bronchial (e.g., by bronchial instillation), buccal, dermal (which may be or comprise, for example, one or more of topical to the dermis, intradermal, interdermal, transdermal, etc), enteral, intra-arterial, intradermal, intragastric, intramedullary, intramuscular, intranasal, intraperitoneal, intrathecal, intravenous, intraventricular, within a specific organ (e. g., intrahepatic), mucosal, nasal, oral, rectal, subcutaneous, sublingual, topical, tracheal (e.g., by intratracheal instillation), vaginal, vitreal, etc. In some embodiments, administration may involve dosing that is intermittent (e.g., a plurality of doses separated in time) and/or periodic (e.g., individual doses separated by a common period of time) dosing. In some embodiments, administration may involve continuous dosing (e.g., perfusion) for at least a selected period of time. In some embodiments, provided technologies are administered intravenously.

[1108] Among other things, the present disclosure provides various structural moieties including designed amino acid residues that can be utilized to optimize various properties and activities, stability, delivery, pharmacodynamics, pharmacokinetics, etc. to provide various dosage forms, dosage regimen, therapeutic windows, etc. In some embodiments, provided agents and compositions thereof may be utilized with improved dosage regimen and/or unit doses. In some embodiments, administration of provided agents are adjusted based on conditions, disorders or diseases and/or subpopulations. In some embodiments, administration and/or dosage regimen of provided technologies are adjusted according to certain biomarkers and genomic alterations.

[1109] Provided agents may deliver biological effects, e.g., therapeutic effects, via various mechanisms. In some embodiments, efficacy may be driven by AUC. In some embodiments, efficacy may be driven by Cmax.

[1110] In some embodiments, a provided agent is utilized in combination with another therapy. In some embodiments, a provided agent is utilized in combination with another therapeutic agent. In some embodiments, another therapy or therapeutic agent is administered prior to an administration or delivery of a provided agent. In some embodiments, another therapy or therapeutic agent is administered at about the same time as an administration or delivery of a provided agent. In some embodiments, a provided agent and another agent is in the same pharmaceutical composition. In some embodiments, another therapy or therapeutic agent is administered subsequently to an administration or delivery of a provided agent. In some embodiments, a subject is exposed to both a provided agent and another therapeutic agent. In some embodiments, both a provided agent and another agent can be detected in a subject. In some embodiments, a provided agent is administered before another agent is cleared out by a subject or vice versa. In some embodiments, a provided agent is administered within the half-life, or 2, 3, 4, 5 or 6 times of the half-life, of another agent or vice versa. In some embodiments, a subject is exposed to a therapeutic effect of a provided agent and a therapeutic effect of another therapeutic agent. In some embodiments, an agent may provide an effect after an agent is cleared out or metabolized by a subject. In some embodiments, a procedure, e.g., surgery, radiation, etc., may provide an effect after the procedure is completed.

[1111] In some embodiments, another therapy is a cancer therapy. In some embodiments, another therapy is or comprises surgery. In some embodiments, another therapy is or comprises radiation therapy. In some embodiments, another therapy is or comprises immunotherapy. In some embodiments, another therapeutic agent is or comprises a drug. In some embodiments, another therapeutic agent is or comprises a cancer drug. In some embodiments, another therapeutic agent is or comprises a chemotherapeutic agent. In some embodiments, another therapeutic agent is or comprises a hormone therapy agent. In some embodiments, another therapeutic agent is or comprises a kinase inhibitor. In some embodiments, another therapeutic agent is or comprises a checkpoint inhibitor (e.g., antibodies against PD1-, PD-L1, CTLA-4, etc.). In some embodiments, a provide agent can be administered with lower unit dose and/or total dose compared to being used alone. In some embodiments, another agent can be administered with lower unit dose and/or total dose compared to being used alone. In some embodiments, one or more side effects associated with administration of a provided agent and/or another therapy or therapeutic agent are reduced. In some embodiments, a combination therapy provides improved results, e.g., when compared to each agent utilized individually. In some embodiments, a combination therapy achieves one or more better results, e.g., when compared to each agent utilized individually.

[1112] In some embodiments, another agent is a checkpoint inhibitor, an EGFR inhibitor, a VEGF inhibitor, a VEGFR inhibitor, a kinase inhibitor, or an anti-cancer drug.

[1113] In some embodiments, an additional agent is a checkpoint inhibitor. In some embodiments, an additional agent is an immune oncology agent. In some embodiments, an additional agent is an antibody against a checkpoint molecules. In some embodiments, an additional agent is an antibody of PD1, PDL-1, CTLA4, A2AR, B7-H3, B7-H4, BTLA, IDO, KIR, LAG3, TIM-s, C10orf54, etc. In some embodiments, an antibody is an anti-PD1 antibody. In some embodiments, an antibody is an anti-PD-L1 antibody. In some embodiments, an antibody is an anti-CTLA4.

[1114] In some embodiments, another agent is an EGFR inhibitor, e.g., erlotinib, gefitinib, lapatinib, panitumumab, vandetanib, cetuximab, etc. In some embodiments, another agent is an VEGF and/or VEGFR inhibitor, e.g., pazopanib, bevacizumab, sorafenib, sunitinib, axitinib, ponatinib, regorafenib, vandetanib, cabozantinib, ramucirumab, lenvatinib, ziv-aflibercept, etc. In some embodiments, another agent is a kinase inhibitor. In some embodiments, another therapeutic agent is a chemotherapeutic agent. In some embodiments, another therapeutic agent is an anti-cancer drug, e.g., cyclophosphamide, methotrexate, 5-fluorouracil (5-FU), doxorubicin, mustine, vincristine, procarbazine, prednisolone, dacarbazine, bleomycin, etoposide, cisplatin, epirubicin, capecitabine, folinic acid, actinomycin, all-trans retinoic acid, azacitidine, azathioprine, bortezomib, carboplatin, chlorambucil, cytarabine, daunorubicin, docetaxel, doxifluridine, fluorouracil, gemcitabine, hydroxyurea, idarubicin, imatinib, irinotecan, mechlorethamine, mercaptopurine, mitoxantrone, paclitaxel, pemetrexed, teniposide, tioguanine, topotecan, valrubicin, vinblastine, vindesine, vinorelbine, oxaliplatin, etc.

[1115] Among other things, the present disclosure provides the following Embodiments:
[1116] 1. A agent having the structure of formula I:

R^{N}-L^{P1}-L^{AA1}-L^{P2}L^{AA2}-L^{P3}-L^{AA3}-L^{P4}-L^{AA4}-L^{P5}-L^{AA5}-L^{P6}-L^{AA6}-L^{P7}-R^{C} I
[1117] or a salt thereof, wherein:
   [1118] R^{N} is a peptide, an amino protecting group or R′-L^{RN}-.
   [1119] each of L^{P1}, L^{P2}, L^{P3}, L^{P4}, L^{P5}, L^{P6}, and L^{P7} is independently L, wherein L^{P1}, L^{P2}, L^{P3}, L^{P4}, L^{P5}, L^{P6}, and L^{P7} comprise:
      [1120] a first R′ group and a second R′ group which are taken together to form -L^{s}- which is bonded to the atom to which a first R′ group is attached and the atom to which a second R′ group is attached; and
      [1121] a third R′ group and a fourth R′ group which are taken together to form -L^{s}- which is bonded to the atom to which a third R′ group is attached and the atom to which a fourth R′ group is attached;
   [1122] each L^{s} is independently -L^{s1}-L^{s2}L^{s3}-, wherein each L^{S1}, L^{s2} and L^{s3} is independently L;
   [1123] L^{AA1} is an amino acid residue that comprises a side chain comprising an acidic or polar group;
   [1124] L^{AA2} is an amino acid residue that comprises a side chain comprising an acidic or polar group;
   [1125] L^{AA3} is an amino acid residue;
   [1126] L^{AA4} is an amino acid residue that comprises a side chain comprising an optionally substituted aromatic group;
   [1127] L^{AA5} is an amino acid residue that comprises a side chain comprising an optionally substituted aromatic group;
   [1128] L^{AA6} is an amino acid residue that comprises a side chain comprising an optionally substituted aromatic group;
   [1129] R^{C} is a peptide, a carboxyl protecting group, -L^{RC}-R′, —O-L^{RC}-R′ or —N(R′)-L^{RC}-R′;
   [1130] each of L^{RN} and L^{RC} is independently L;
   [1131] each L is independently a covalent bond, or an optionally substituted, bivalent C₁-C₂₅ aliphatic or heteroaliphatic group having 1-10 heteroatoms, wherein one or more methylene units of the group are optionally and independently replaced with —C(R′)₂—, -Cy-, —O—, —S—, —S—S—, —N(R′)—, —C(O)—, —C(S)—, —C(NR′)—, —C(O)N(R′)—, —N(R′)C(O)N(R′)—, —N(R′)C(O)O—, —S(O)—, —S(O)₂—, —S(O)₂N(R′)—, —C(O)S—, or —C(O)O—;
   [1132] each -Cy- is independently an optionally substituted bivalent, 3-30 membered, monocyclic, bicyclic or polycyclic ring having 0-10 heteroatoms;
   [1133] each R′ is independently -L-R, —C(O)R, —CO₂R, or —SO₂R;
   [1134] each R is independently —H, or an optionally substituted group selected from C₁₋₃₀ aliphatic, C₁₋₃₀ heteroaliphatic having 1-10 heteroatoms, C₆₋₃₀ aryl, C₆₋₃₀ arylaliphatic, C₆₋₃₀ arylheteroaliphatic having 1-10 heteroatoms, 5-30 membered heteroaryl having 1-10 heteroatoms, and 3-30 membered heterocyclyl having 1-10 heteroatoms, or
   [1135] two R groups are optionally and independently taken together to form a covalent bond, or:
   [1136] two or more R groups on the same atom are optionally and independently taken together with the atom to form an optionally substituted, 3-30 membered, monocyclic, bicyclic or polycyclic ring having, in addition to the atom, 0-10 heteroatoms; or
   [1137] two or more R groups on two or more atoms are optionally and independently taken together with their intervening atom(s) to form an optionally substituted, 3-30 membered, monocyclic, bicyclic or polycyclic ring having, in addition to the intervening atom(s), 0-10 heteroatoms.
[1138] 2. A agent having the structure of formula I:

R^{N}-L^{P1}-L^{AA1}-L^{P2}L^{AA2}-L^{P3}-L^{AA3}-L^{P4}-L^{AA4}-L^{P5}-L^{AA5}-L^{P6}-L^{AA6}-L^{P7}-R^{C} I
[1139] or a salt thereof, wherein:
   [1140] R^{N} is a peptide, an amino protecting group or R′-L^{RN}-.
   [1141] each of L^{P1}, L^{P2}, L^{P3}, L^{P4}, L^{P5}, L^{P6}, and L^{P7} is independently L, wherein L^{P1}, L^{P2}, L^{P3}, L^{P4}, L^{P5}, L^{P6}, and L^{P7} comprise:
      [1142] a first R′ group and a second R′ group which are taken together to form -L^{s}- which is bonded to the atom to which a first R′ group is attached and the atom to which a second R′ group is attached; and
      [1143] a third R′ group and a fourth R′ group which are taken together to form -L^{s}- which is bonded to the atom to which a third R′ group is attached and the atom to which a fourth R′ group is attached;
   [1144] each L^{s} is independently -L^{s1}-L^{s2}-L^{s3}-, wherein each L^{s1}, L^{s2} and L^{s3} is independently L;
   [1145] L^{AA1} is L^{AR}, wherein a methylene unit is replaced with —C(R′)(R^{As})—, wherein R^{AS} is -L^{AS1}-R^{AA1} wherein R^{AA1} is —CO₂R or —SO₂R;
   [1146] L^{AA2} is L^{AR}, wherein a methylene unit is replaced with —C(R′)(R^{AS})—, wherein R^{AS} is -L^{AS2}-R^{AA2} wherein R^{AA2} is —CO₂R, or —SO₂R;
   [1147] L^{AA3} is L^{AR}, wherein a methylene unit is replaced with —C(R′)(R^{AS})—, wherein R^{AS} is -L^{AS3}-R^{AA3} wherein R^{AA3} is R′;
   [1148] L^{AA4} is L^{AR}, wherein a methylene unit is replaced with —C(R′)(R^{AS})—, wherein R^{AS} is -L^{AS4}-R^{AA4} wherein R^{AA4} is an optionally substituted group selected from 6-14 membered aryl or 5-14 membered heteroaryl having 1−6 heteroatoms;
   [1149] L^{AA5} is L^{AR}, wherein a methylene unit is replaced with —C(R′)(R^{AS})—, wherein R^{AS} is -L^{AS5}-R^{AA5}wherein R^{AA5} is an optionally substituted group selected from 6-14 membered aryl or 5-14 membered heteroaryl having 1−6 heteroatoms;
   [1150] L^{AA6} is L^{AR}, wherein a methylene unit is replaced with —C(R′)(R^{AS})—, wherein R^{AS} is -L^{AS6}R^{AA6}, wherein R^{AA6} is an optionally substituted group selected from 6-14 membered aryl or 5-14 membered heteroaryl having 1−6 heteroatoms;
   [1151] R^{C} is a peptide, a carboxyl protecting group, -L^{RC}-R′, —O-L^{RC}-R′ or —N(R′)-L^{RC}-R′;
   [1152] each of L^{RN} and L^{RC} is independently L;
   [1153] each L^{A}R is independently an optionally substituted, bivalent C₁-C₆ aliphatic group, wherein one or more methylene units of the group are optionally and independently replaced with —C(R′)₂—, —C(R′)(R^{AS})—, -Cy-, —O—, —S—, —S—S—, —N(R′)—, —C(O)—, —C(S)—, —C(NR′)—, —C(O)N(R′)—, —N(R′)C(O)N(R′)—, —N(R′)C(O)O—, —S(O)—, —S(O)₂—, —S(O)₂N(R′)—, —C(O)S—, or —C(O)O—;
   [1154] each of L^{AS1}, L^{AS2}, L^{AS3}, L^{AS4}, L^{AS5}, and L^{AS6} is independently L^{AS};
   [1155] each R^{AS} is independently -L^{AS}-R′;
   [1156] each L^{AS} is independently a covalent bond or an optionally substituted, bivalent C₁-C₁₀ aliphatic or heteroaliphatic group having 1-5 heteroatoms, wherein one or more methylene units of the group optionally and independently replaced with —C(R′)₂—, -Cy-, —O—, —S—, —S—S—, —N(R′)—, —C(O)—, —C(S)—, —C(NR′)—, —C(O)N(R′)—, —N(R′)C(O)N(R′)—, —N(R′)C(O)O—, —S(O)—, —S(O)₂—, —S(O)₂N(R′)—, —C(O)S—, or —C(O)O—;
   [1157] each L is independently a covalent bond, or an optionally substituted, bivalent C₁-C₂₅ aliphatic or heteroaliphatic group having 1-10 heteroatoms, wherein one or more methylene units of the group are optionally and independently replaced with —C(R′)₂—, -Cy-, —O—, —S—, —S—S—, —N(R′)—, —C(O)—, —C(S)—, —C(NR′)—, —C(O)N(R′)—, —N(R′)C(O)N(R′)—, —N(R′)C(O)O—, —S(O)—, —S(O)₂—, —S(O)₂N(R′)—, —C(O)S—, or —C(O)O—;
   [1158] each -Cy- is independently an optionally substituted bivalent, 3-30 membered, monocyclic, bicyclic or polycyclic ring having 0-10 heteroatoms;
   [1159] each R′ is independently -L-R, —C(O)R, —CO₂R, or —SO₂R;
   [1160] each R is independently —H, or an optionally substituted group selected from C₁₋₃₀ aliphatic, C₁₋₃₀ heteroaliphatic having 1-10 heteroatoms, C₆₋₃₀ aryl, C₆₋₃₀ arylaliphatic, C₆₋₃₀ arylheteroaliphatic having 1-10 heteroatoms, 5-30 membered heteroaryl having 1-10 heteroatoms, and 3-30 membered heterocyclyl having 1-10 heteroatoms, or
   [1161] two R groups are optionally and independently taken together to form a covalent bond, or:
   [1162] two or more R groups on the same atom are optionally and independently taken together with the atom to form an optionally substituted, 3-30 membered, monocyclic, bicyclic or polycyclic ring having, in addition to the atom, 0-10 heteroatoms; or
   [1163] two or more R groups on two or more atoms are optionally and independently taken together with their intervening atom(s) to form an optionally substituted, 3-30 membered, monocyclic, bicyclic or polycyclic ring having, in addition to the intervening atom(s), 0-10 heteroatoms.
[1164] 3. The agent of any one of the preceding Embodiments, wherein a second R′ group and a third R′ group are attached to the same atom.
[1165] 4. The agent of any one of the preceding Embodiments, wherein each of the first, second and fourth R′ groups is independently attached to a different atom.
[1166] 5. The agent of any one of the preceding Embodiments, wherein L^{s} formed by taking the first and the second R′ groups together is a staple as described herein.
[1167] 6. The agent of any one of the preceding Embodiments, wherein L^{s} formed by taking the first and the second R′ groups together has a length of 5-20 (e.g., 5, 6, 7, 8, 9, 10, 11, 12, 13, 14, 15, 16, 17, 18, 19, or 20) atoms.
[1168] 7. The agent of any one of the preceding Embodiments, wherein L^{s} formed by taking the third and the fourth R′ groups together is a staple as described herein.
[1169] 8. The agent of any one of the preceding Embodiments, wherein L^{s} formed by taking the third and the fourth R′ groups together has a length of 5-20 (e.g., 5, 6, 7, 8, 9, 10, 11, 12, 13, 14, 15, 16, 17, 18, 19, or 20) atoms.
[1170] 9. The agent of any one of the preceding Embodiments, wherein L^{s} formed by taking the third and the fourth R′ groups together has a length of 10-20 (e.g., 10, 11, 12, 13, 14, 15, 16, 17, 18, 19, or 20) atoms.
[1171] 10. The agent of any one of the preceding Embodiments, wherein L^{P1} is a covalent bond, or an optionally substituted, bivalent C₂-C₆ aliphatic group, wherein one or more methylene units of the group are optionally and independently replaced with —C(R′)₂—, -Cy-, —O—, —S—, —N(R′)—, —C(O)—, —C(S)—, —C(NR′)—, —C(O)N(R′)—, —N(R′)C(O)N(R′)—, —N(R′)C(O)O—, —S(O)—, —S(O)₂—, —S(O)₂N(R′)—, —C(O)S—, or —C(O)O—.
[1172] 11. The agent of any one of the preceding Embodiments, wherein the length of L^{P} is 2-10 (2, 3, 4, 5, 6, 7, 8, 9, or 10) atoms.
[1173] 12. The agent of any one of the preceding Embodiments, wherein one or more methylene units of L^{P1} are independently replaced with —N(R′)— or —C(O)—.
[1174] 13. The agent of any one of the preceding Embodiments, wherein one or more methylene units of L^{P1} are independently replaced with —N(R′)— or —C(O)N(R′)—.
[1175] 14. The agent of any one of the preceding Embodiments, wherein one or more methylene units of L^{P1} are independently replaced with —N(R′)—, —C(R′)₂, or —C(O)N(R′)—.
[1176] 15. The agent of any one of the preceding Embodiments, wherein one or more methylene units of L^{P1} are independently replaced with —N(R′)—, and one or more methylene units of L^{P1} are independently replaced with —C(O)N(R′)—.
[1177] 16. The agent of any one of the preceding Embodiments, wherein a methylene unit of L^{P1} is replaced with —C(R′)₂—, wherein one of the R′ groups is a first R′ group of the four R′ groups, or a methylene unit of L^{P1} is replaced with —N(R′)—, wherein the R′ group is a first R′ group of the four R′ groups.
[1178] 17. The agent of any one of the preceding Embodiments, wherein a methylene unit of L^{P1} is replaced with —C(R′)₂—, wherein one of the R′ groups is a first R′ group of the four R′ groups.
[1179] 18. The agent of any one of the preceding Embodiments, wherein L^{P1} is or comprises —[X]ₚ—X¹—, wherein each X and X¹ is independently an amino acid residue, wherein p is 0-10, and X¹ is bonded to L^{AA1}.
[1180] 19. The agent of any one of the preceding Embodiments, wherein L^{P1} is or comprises —X¹—.
[1181] 20. The agent of any one of the preceding Embodiments, wherein X¹ comprises the first R′ group of the four R′ groups.
[1182] 21. The agent of any one of the preceding Embodiments, wherein L^{AA1} is an optionally substituted, bivalent C₂-C₄ aliphatic group, wherein one or more methylene units of the group are optionally and independently replaced with —C(R′)₂—, —C(R′)(R^{AS})—, -Cy-, —O—, —S—, —S—S—, —N(R′)—, —C(O)—, —C(S)—, —C(NR′)—, —C(O)N(R′)—, —N(R′)C(O)N(R′)—, —N(R′)C(O)O—, —S(O)—, —S(O)₂—, —S(O)₂N(R′)—, —C(O)S—, or —C(O)O—.
[1183] 22. The agent of any one of the preceding Embodiments, wherein L^{AA1} is —N(R′)—C(R′)(R^{AS})—C(O)—.
[1184] 23. The agent of any one of the preceding Embodiments, wherein L^{AA1} is NH—C(R′)(RA)C(O)—.
[1185] 24. The agent of any one of the preceding Embodiments, wherein L^{AS1} is an optionally substituted, bivalent C₁-C₁₀ aliphatic group, wherein one or more methylene units of the group optionally and independently replaced with —C(R′)₂—, -Cy-, —O—, —S—, —S—S—, —N(R′)—, —C(O)—, —C(S)—, —C(NR′)—, —C(O)N(R′)—, —N(R′)C(O)N(R′)—, —N(R′)C(O)O—, —S(O)—, —S(O)₂—, —S(O)₂N(R′)—, —C(O)S—, or —C(O)O—.
[1186] 25. The agent of any one of the preceding Embodiments, wherein L^{AS1} is an optionally substituted, bivalent C₁-C₁₀ aliphatic group, wherein one or more methylene units of the group optionally and independently replaced with —C(R′)₂—, -Cy-, —O—, —S—, —N(R′)—, —C(O)—, —S(O)—, or —S(O)₂—.
[1187] 26. The agent of any one of the preceding Embodiments, wherein L^{AS1} is an optionally substituted, bivalent C₁-C₁₀ aliphatic group, wherein one or more methylene units of the group optionally and independently replaced with —O—, —S—, or —N(R′)—.
[1188] 27. The agent of any one of the preceding Embodiments, wherein L^{AS1} is an optionally substituted, bivalent C₁-C₁₀ alkylene group.
[1189] 28. The agent of any one of the preceding Embodiments, wherein L^{AS1} is optionally substituted —CH₂—.
[1190] 29. The agent of any one of the preceding Embodiments, wherein L^{AS1} is —CH₂—.
[1191] 30. The agent of any one of the preceding Embodiments, wherein R^{AA1} is —CO₂R.
[1192] 31. The agent of any one of the preceding Embodiments, wherein R^{AA1} is —CO₂H.
[1193] 32. The agent of any one of the preceding Embodiments, wherein L^{AA1} is an amino acid residue that comprises a side chain comprising an acidic group.
[1194] 33. The agent of any one of the preceding Embodiments, wherein L^{AA1} is X².
[1195] 34. The agent of any one of the preceding Embodiments, wherein L^{P2} is a covalent bond, or an optionally substituted, bivalent C₂-C₆ aliphatic group, wherein one or more methylene units of the group are optionally and independently replaced with —C(R′)₂—, -Cy-, —O—, —S—, —N(R′)—, —C(O)—, —C(S)—, —C(NR′)—, —C(O)N(R′)—, —N(R′)C(O)N(R′)—, —N(R′)C(O)O—, —S(O)—, —S(O)₂—, —S(O)₂N(R′)—, —C(O)S—, or —C(O)O—.
[1196] 35. The agent of any one of the preceding Embodiments, wherein the length of L^{P2} is 2-10 (2, 3, 4, 5, 6, 7, 8, 9, or 10) atoms.
[1197] 36. The agent of any one of the preceding Embodiments, wherein the length of L^{P2} is 6 atoms.
[1198] 37. The agent of any one of the preceding Embodiments, wherein one or more methylene units of L^{P2} are independently replaced with —N(R′)— or —C(O)—.
[1199] 38. The agent of any one of the preceding Embodiments, wherein one or more methylene units of L^{P2} are independently replaced with —N(R′)— or —C(O)N(R′)—.
[1200] 39. The agent of any one of the preceding Embodiments, wherein one or more methylene units of L^{P2} are independently replaced with —N(R′)—, —C(R′)₂, or —C(O)N(R′)—.
[1201] 40. The agent of any one of the preceding Embodiments, wherein one or more methylene units of L^{P2} are independently replaced with —N(R′)—, and one or more methylene units of L^{P2} are independently replaced with —C(O)N(R′)—.
[1202] 41. The agent of any one of the preceding Embodiments, wherein a methylene unit of L^{P2} is replaced with —C(R′)₂—, wherein one of the R′ groups is the second R′ group and the other is the third R′ group of the four R′ groups.
[1203] 42. The agent of any one of the preceding Embodiments, wherein L^{P2} is or comprises —[X]pX⁴[X]p′-, wherein each X and X⁴ is independently an amino acid residue, and each of p and p′ is independently 0-10.
[1204] 43. The agent of any one of the preceding Embodiments, wherein L^{P2} is or comprises —[X]pX³X⁴[X]p′-, wherein each X and X⁴ is independently an amino acid residue, and each of p and p′ is independently 0-10.
[1205] 44. The agent of any one of the preceding Embodiments, wherein L^{P2} is or comprises —X³X⁴—, wherein each X³ and X⁴ is independently an amino acid residue, and X⁴ is bonded to L^{AA2}.
[1206] 45. The agent of any one of the preceding Embodiments, wherein X⁴ comprises —C(R′)₂—, wherein one of the R′ groups is the second R′ group and the other is the third R′ group of the four R′ groups.
[1207] 46. The agent of any one of the preceding Embodiments, wherein L^{s} formed by taking the first and the second R′ groups together has the structure of a L^{s} group bonded to X¹ and X⁴ as described herein.
[1208] 47. The agent of any one of the preceding Embodiments, wherein L^{s} formed by taking the third and the fourth R′ groups together has the structure of a L^{s} group bonded to X⁴ and X¹ as described herein.
[1209] 48. The agent of any one of the preceding Embodiments, wherein L^{AA2} is an optionally substituted, bivalent C₂-C₄ aliphatic group, wherein one or more methylene units of the group are optionally and independently replaced with —C(R′)₂—, —C(R′)(R^{AS})—, -Cy-, —O—, —S—, —S—S—, —N(R′)—, —C(O)—, —C(S)—, —C(NR′)—, —C(O)N(R′)—, —N(R′)C(O)N(R′)—, —N(R′)C(O)O—, —S(O)—, —S(O)₂—, —S(O)₂N(R′)—, —C(O)S—, or —C(O)O—.
[1210] 49. The agent of any one of the preceding Embodiments, wherein L^{AA2} is —N(R′)—C(R′)(R^{AS})—C(O)—.
[1211] 50. The agent of any one of the preceding Embodiments, wherein L^{AA2} is —NH—C(R′)(R^{AS})C(O)—.
[1212] 51. The agent of any one of the preceding Embodiments, wherein L^{AS2} is an optionally substituted, bivalent C₁-C₁₀ aliphatic group, wherein one or more methylene units of the group optionally and independently replaced with —C(R′)₂—, -Cy-, —O—, —S—, —S—S—, —N(R′)—, —C(O)—, —C(S)—, —C(NR′)—, —C(O)N(R′)—, —N(R′)C(O)N(R′)—, —N(R′)C(O)O—, —S(O)—, —S(O)₂—, —S(O)₂N(R′)—, —C(O)S—, or —C(O)O—.
[1213] 52. The agent of any one of the preceding Embodiments, wherein L^{AS2} is an optionally substituted, bivalent C₁-C₁₀ aliphatic group, wherein one or more methylene units of the group optionally and independently replaced with —C(R′)₂—, -Cy-, —O—, —S—, —N(R′)—, —C(O)—, —S(O)—, or —S(O)₂—.
[1214] 53. The agent of any one of the preceding Embodiments, wherein L^{AS2} is an optionally substituted, bivalent C₁-C₁₀ aliphatic group, wherein one or more methylene units of the group optionally and independently replaced with —O—, —S—, or —N(R′)—.
[1215] 54. The agent of any one of the preceding Embodiments, wherein L^{AS2} is an optionally substituted, bivalent C₁-C₁₀ alkylene group.
[1216] 55. The agent of any one of the preceding Embodiments, wherein L^{AS2} is optionally substituted —CH₂—.
[1217] 56. The agent of any one of the preceding Embodiments, wherein L^{AS2} is —CH₂—.
[1218] 57. The agent of any one of the preceding Embodiments, wherein R^{AA2} is —CO₂R.
[1219] 58. The agent of any one of the preceding Embodiments, wherein R^{AA2} is —C₂H.
[1220] 59. The agent of any one of the preceding Embodiments, wherein L^{AA2} is an amino acid residue that comprises a side chain comprising an acidic group.
[1221] 60. The agent of any one of the preceding Embodiments, wherein L^{AA2} is X⁵.
[1222] 61. The agent of any one of the preceding Embodiments, wherein the length of L^{P3} is 0-10 (0, 1, 2, 3, 4, 5, 6, 7, 8, 9, or 10) atoms.
[1223] 62. The agent of any one of the preceding Embodiments, wherein L^{P3} is a covalent bond, or an optionally substituted, bivalent C₂-C₆ aliphatic group, wherein one or more methylene units of the group are optionally and independently replaced with —C(R′)₂—, -Cy-, —O—, —S—, —N(R′)—, —C(O)—, —C(S)—, —C(NR′)—, —C(O)N(R′)—, —N(R′)C(O)N(R′)—, —N(R′)C(O)O—, —S(O)—, —S(O)₂—, —S(O)₂N(R′)—, —C(O)S—, or —C(O)O—.
[1224] 63. The agent of any one of the preceding Embodiments, wherein the length of L^{P3} is 0-10 (0, 1, 2, 3, 4, 5, 6, 7, 8, 9, or 10) atoms.
[1225] 64. The agent of any one of the preceding Embodiments, wherein L^{P3} is a covalent bond.
[1226] 65. The agent of any one of the preceding Embodiments, wherein L^{A3} is an optionally substituted, bivalent C₂-C₄ aliphatic group, wherein one or more methylene units of the group are optionally and independently replaced with —C(R′)₂—, —C(R′)(R^{AS})—, -Cy-, —O—, —S—, —S—S—, —N(R′)—, —C(O)—, —C(S)—, —C(NR′)—, —C(O)N(R′)—, —N(R′)C(O)N(R′)—, —N(R′)C(O)O—, —S(O)—, —S(O)₂—, —S(O)₂N(R′)—, —C(O)S—, or —C(O)O—.
[1227] 66. The agent of any one of the preceding Embodiments, wherein L^{AA3} is —N(R′)—C(R′)(R^{AS})—C(O)—.
[1228] 67. The agent of any one of the preceding Embodiments, wherein L^{AA3} is —NH—C(R′)(R^{AS})C(O)—.
[1229] 68. The agent of any one of the preceding Embodiments, L^{AS3} is an optionally substituted, bivalent C₁-C₁₀ aliphatic group, wherein one or more methylene units of the group optionally and independently replaced with —C(R′)₂—, -Cy-, —O—, —S—, —S—S—, —N(R′)—, —C(O)—, —C(S)—, —C(NR′)—, —C(O)N(R′)—, —N(R′)C(O)N(R′)—, —N(R′)C(O)O—, —S(O)—, —S(O)₂—, —S(O)₂N(R′)—, —C(O)S—, or —C(O)O—.
[1230] 69. The agent of any one of the preceding Embodiments, wherein R^{AS} is -L^{AS}-R^{AA3}, wherein L^{AS3} is an optionally substituted, bivalent C₁-C₁₀ aliphatic group, wherein one or more methylene units of the group optionally and independently replaced with —C(R′)₂—, -Cy-, —O—, —S—, —N(R′)—, —C(O)—, —S(O)—, or —S(O)₂—.
[1231] 70. The agent of any one of the preceding Embodiments, wherein L^{AS3} is an optionally substituted, bivalent C₁-C₁₀ aliphatic group, wherein one or more methylene units of the group optionally and independently replaced with —O—, —S—, or —N(R′)—.
[1232] 71. The agent of any one of the preceding Embodiments, wherein L^{AS3} is an optionally substituted, bivalent C₁-C₁₀ alkylene group.
[1233] 72. The agent of any one of the preceding Embodiments, wherein L^{AS3} is optionally substituted —CH₂—.
[1234] 73. The agent of any one of the preceding Embodiments, wherein L^{AS3} is —CH₂—.
[1235] 74. The agent of any one of the preceding Embodiments, wherein R^{AA3} is —CO₂R.
[1236] 75. The agent of any one of the preceding Embodiments, wherein R^{AA3} is —CO₂H.
[1237] 76. The agent of any one of the preceding Embodiments, wherein L^{AA3} is an amino acid residue that comprises a side chain comprising an acidic group.
[1238] 77. The agent of any one of the preceding Embodiments, wherein L^{AA3} is X⁶.
[1239] 78. The agent of any one of the preceding Embodiments, wherein L^{P4} is a covalent bond, or an optionally substituted, bivalent C₂-C₆ aliphatic group, wherein one or more methylene units of the group are optionally and independently replaced with —C(R′)₂—, -Cy-, —O—, —S—, —N(R′)—, —C(O)—, —C(S)—, —C(NR′)—, —C(O)N(R′)—, —N(R′)C(O)N(R′)—, —N(R′)C(O)O—, —S(O)—, —S(O)₂—, —S(O)₂N(R′)—, —C(O)S—, or —C(O)O—.
[1240] 79. The agent of any one of the preceding Embodiments, wherein the length of L^{P4} is 2-10 (2, 3, 4, 5, 6, 7, 8, 9, or 10) atoms.
[1241] 80. The agent of any one of the preceding Embodiments, wherein the length of L^{P4} is 6 atoms.
[1242] 81. The agent of any one of the preceding Embodiments, wherein one or more methylene units of L^{P4} are independently replaced with —N(R′)— or —C(O)—.
[1243] 82. The agent of any one of the preceding Embodiments, wherein one or more methylene units of L^{P4} are independently replaced with —N(R′)— or —C(O)N(R′)—.
[1244] 83. The agent of any one of the preceding Embodiments, wherein one or more methylene units of L^{P4} are independently replaced with —N(R′)—, —C(R′)₂, or —C(O)N(R′)—.
[1245] 84. The agent of any one of the preceding Embodiments, wherein one or more methylene units of L^{P4} are independently replaced with —N(R′)—, and one or more methylene units of L^{P4} are independently replaced with —C(O)N(R′)—.
[1246] 85. The agent of any one of the preceding Embodiments, wherein L^{P4} is or comprises —[X]pX⁷X⁸[X]p′—, wherein each X and X¹¹ is independently an amino acid residue, and each of p and p′ is independently 0-10.
[1247] 86. The agent of any one of the preceding Embodiments, wherein L^{P4} is or comprises —X⁷X⁸—, wherein each X⁷ and X⁸ is independently an amino acid residue, and ^{X} is bonded to LA4.
[1248] 87. The agent of any one of the preceding Embodiments, wherein L^{A4} is an optionally substituted, bivalent C₂-C₄ aliphatic group, wherein one or more methylene units of the group are optionally and independently replaced with —C(R′)₂—, —C(R′)(R^{AS})—, -Cy-, —O—, —S—, —S—S—, —N(R′)—, —C(O)—, —C(S)—, —C(NR′)—, —C(O)N(R′)—, —N(R′)C(O)N(R′)—, —N(R′)C(O)O—, —S(O)—, —S(O)₂—, —S(O)₂N(R′)—, —C(O)S—, or —C(O)O—.
[1249] 88. The agent of any one of the preceding Embodiments, wherein L^{AA4} is —N(R′)—C(R′)(R^{AS})—C(O)—.
[1250] 89. The agent of any one of the preceding Embodiments, wherein L^{AA4} is —NH—C(R′)(RA)C(O)—.
[1251] 90. The agent of any one of the preceding Embodiments, wherein L^{AS4} is an optionally substituted, bivalent C₁-C₁₀ aliphatic group, wherein one or more methylene units of the group optionally and independently replaced with —C(R′)₂—, -Cy-, —O—, —S—, —S—S—, —N(R′)—, —C(O)—, —C(S)—, —C(NR′)—, —C(O)N(R′)—, —N(R′)C(O)N(R′)—, —N(R′)C(O)O—, —S(O)—, —S(O)₂—, —S(O)₂N(R′)—, —C(O)S—, or —C(O)O—.
[1252] 91. The agent of any one of the preceding Embodiments, wherein L^{AS4} is an optionally substituted, bivalent C₁-C₁₀ aliphatic group, wherein one or more methylene units of the group optionally and independently replaced with —C(R′)₂—, -Cy-, —O—, —S—, —N(R′)—, —C(O)—, —S(O)—, or —S(O)₂—.
[1253] 92. The agent of any one of the preceding Embodiments, L^{AS4} is an optionally substituted, bivalent C₁-C₁₀ aliphatic group, wherein one or more methylene units of the group optionally and independently replaced with —O—, —S—, or —N(R′)—.
[1254] 93. The agent of any one of the preceding Embodiments, wherein L^{AS4} is an optionally substituted, bivalent C₁-C₁₀ alkylene group.
[1255] 94. The agent of any one of the preceding Embodiments, wherein L^{AS4} is optionally substituted —CH₂—.
[1256] 95. The agent of any one of the preceding Embodiments, wherein L^{AS4} is —CH₂—.
[1257] 96. The agent of any one of the preceding Embodiments, wherein R^{AA4} is optionally substituted 6-14 membered aryl.
[1258] 97. The agent of any one of the preceding Embodiments, wherein R^{AA4} is optionally substituted phenyl.
[1259] 98. The agent of any one of the preceding Embodiments, wherein R^{AA4} is phenyl.
[1260] 99. The agent of any one of Embodiments 1-95, wherein R^{AA4} is optionally substituted 5-14 membered heteroaryl having 1−6 heteroatoms.
[1261] 100. The agent of any one of Embodiments 1-95, wherein R^{AA4} is optionally substituted 5-membered monocyclic heteroaryl having 1-4 heteroatoms.
[1262] 101. The agent of any one of Embodiments 1-95, wherein R^{AA4} is optionally substituted

[chemical structure]

[1263] 102. The agent of any one of Embodiments 1-95, wherein R^{AA4} is optionally substituted 9-membered bicyclic heteroaryl having 1-4 heteroatoms.
[1264] 103. The agent of any one of Embodiments 1-95, wherein R^{AA4} is optionally substituted 10-membered bicyclic heteroaryl having 1-4 heteroatoms.
[1265] 104. The agent of any one of Embodiments 1-95, wherein R^{AA4} is optionally substituted

[chemical structure]

[1266] 105. The agent of any one of Embodiments 1-95, wherein R^{AA4} is optionally substituted

[chemical structure]

[1267] 106. The agent of any one of the preceding Embodiments, wherein L^{AA4} is an amino acid residue.
[1268] 107. The agent of any one of the preceding Embodiments, wherein L^{AA4} is X⁹.
[1269] 108. The agent of any one of the preceding Embodiments, wherein L^{P5} is a covalent bond, or an optionally substituted, bivalent C₂-C₆ aliphatic group, wherein one or more methylene units of the group are optionally and independently replaced with —C(R′)₂—, -Cy-, —O—, —S—, —N(R′)—, —C(O)—, —C(S)—, —C(NR′)—, —C(O)N(R′)—, —N(R′)C(O)N(R′)—, —N(R′)C(O)O—, —S(O)—, —S(O)₂—, —S(O)₂N(R′)—, —C(O)S—, or —C(O)O—.
[1270] 109. The agent of any one of the preceding Embodiments, wherein the length of L^{P5} is 2-10 (2, 3, 4, 5, 6, 7, 8, 9, or 10) atoms.
[1271] 110. The agent of any one of the preceding Embodiments, wherein the length of L^{P5} is 6 atoms.
[1272] 111. The agent of any one of the preceding Embodiments, wherein one or more methylene units of L^{P5} are independently replaced with —N(R′)— or —C(O)—.
[1273] 112. The agent of any one of the preceding Embodiments, wherein one or more methylene units of L^{P5}are independently replaced with —N(R′)— or —C(O)N(R′)—.
[1274] 113. The agent of any one of the preceding Embodiments, wherein one or more methylene units of L^{P5}are independently replaced with —N(R′)—, —C(R′)₂, or —C(O)N(R′)—.
[1275] 114. The agent of any one of the preceding Embodiments, wherein one or more methylene units of L^{P5}are independently replaced with —N(R′)—, and one or more methylene units of L^{P5} are independently replaced with —C(O)N(R′)—.
[1276] 115. The agent of any one of the preceding Embodiments, wherein a methylene unit of L^{P5} is replaced with —C(R′)₂—, wherein one of the R′ groups is the fourth R′ group.
[1277] 116. The agent of any one of the preceding Embodiments, wherein L^{P5} is or comprises —[X]pX¹¹[X]p′-, wherein each X and X¹¹ is independently an amino acid residue, and each of p and p′ is independently 0-10.
[1278] 117. The agent of any one of the preceding Embodiments, wherein L^{P5} is or comprises —X¹⁰X¹¹—, wherein each X¹⁰ and X¹¹ is independently an amino acid residue, and X¹¹ is bonded to L^{AA5}.
[1279] 118. The agent of any one of the preceding Embodiments, wherein X¹¹ comprises —C(R′)₂—, wherein one of the R′ groups is the fourth R′ group.
[1280] 119. The agent of any one of the preceding Embodiments, wherein L^{AA5} is an optionally substituted, bivalent C₂-C₄ aliphatic group, wherein one or more methylene units of the group are optionally and independently replaced with —C(R′)₂—, —C(R′)(R^{AS})—, -Cy-, —O—, —S—, —S—S—, —N(R′)—, —C(O)—, —C(S)—, —C(NR′)—, —C(O)N(R′)—, —N(R′)C(O)N(R′)—, —N(R′)C(O)O—, —S(O)—, —S(O)₂—, —S(O)₂N(R′)—, —C(O)S—, or —C(O)O—.
[1281] 120. The agent of any one of the preceding Embodiments, wherein L^{AA5} is —N(R′)—C(R′)(R^{AS})—C(O)—.
[1282] 121. The agent of any one of the preceding Embodiments, wherein L^{AA5} is —NH—C(R′)(RA)C(O)—.
[1283] 122. The agent of any one of the preceding Embodiments, wherein L^{AS5} is an optionally substituted, bivalent C₁-C₁₀ aliphatic group, wherein one or more methylene units of the group optionally and independently replaced with —C(R′)₂—, -Cy-, —O—, —S—, —S—S—, —N(R′)—, —C(O)—, —C(S)—, —C(NR′)—, —C(O)N(R′)—, —N(R′)C(O)N(R′)—, —N(R′)C(O)O—, —S(O)—, —S(O)₂—, —S(O)₂N(R′)—, —C(O)S—, or —C(O)O—.
[1284] 123. The agent of any one of the preceding Embodiments, wherein L^{AS5} is an optionally substituted, bivalent C₁-C₁₀ aliphatic group, wherein one or more methylene units of the group optionally and independently replaced with —C(R′)₂—, -Cy-, —O—, —S—, —N(R′)—, —C(O)—, —S(O)—, or —S(O)₂—.
[1285] 124. The agent of any one of the preceding Embodiments, wherein L^{AS5} is an optionally substituted, bivalent C₁-C₁₀ aliphatic group, wherein one or more methylene units of the group optionally and independently replaced with —O—, —S—, or —N(R′)—.
[1286] 125. The agent of any one of the preceding Embodiments, wherein L^{AS5} is an optionally substituted, bivalent C₁-C₁₀ alkylene group.
[1287] 126. The agent of any one of the preceding Embodiments, wherein L^{AS5} is optionally substituted —CH₂—.
[1288] 127. The agent of any one of the preceding Embodiments, wherein L^{AS5} is —CH₂—.
[1289] 128. The agent of any one of the preceding Embodiments, wherein R^{AA5} is optionally substituted 6-14 membered aryl.
[1290] 129. The agent of any one of the preceding Embodiments, wherein R^{AA5} is optionally substituted phenyl.
[1291] 130. The agent of any one of the preceding Embodiments, wherein R^{AAA5} is phenyl.
[1292] 131. The agent of any one of Embodiments 1-95, wherein R^{AA5} is optionally substituted 5-14 membered heteroaryl having 1−6 heteroatoms.
[1293] 132. The agent of any one of Embodiments 1-95, wherein R^{AA5} is optionally substituted 5-membered monocyclic heteroaryl having 1-4 heteroatoms.

[1294] 133. The agent of any one of Embodiments 1-95, wherein R^{AA5} is optionally substituted

[chemical structure]

[1295] 134. The agent of any one of Embodiments 1-95, wherein R^{AA5} is optionally substituted 9-membered bicyclic heteroaryl having 1-4 heteroatoms.
[1296] 135. The agent of any one of Embodiments 1-95, wherein R^{AA5} is optionally substituted 10-membered bicyclic heteroaryl having 1-4 heteroatoms.
[1297] 136. The agent of any one of Embodiments 1-95, wherein R^{AA5} is optionally substituted

[chemical structure]

[1298] 137. The agent of any one of Embodiments 1-95, wherein R^{AA5} is optionally substituted

[chemical structure]

[1299] 138. The agent of any one of the preceding Embodiments, wherein L^{AA5} is an amino acid residue.
[1300] 139. The agent of any one of the preceding Embodiments, wherein L^{AA5} is X¹².
[1301] 140. The agent of any one of the preceding Embodiments, wherein L^{P6} is a covalent bond, or an optionally substituted, bivalent C₂-C₆ aliphatic group, wherein one or more methylene units of the group are optionally and independently replaced with —C(R′)₂—, -Cy-, —O—, —S—, —N(R′)—, —C(O)—, —C(S)—, —C(NR′)—, —C(O)N(R′)—, —N(R′)C(O)N(R′)—, —N(R′)C(O)O—, —S(O)—, —S(O)₂—, —S(O)₂N(R′)—, —C(O)S—, or —C(O)O—.
[1302] 141. The agent of any one of the preceding Embodiments, wherein the length of L^{P6} is 0-10 (0, 1, 2, 3, 4, 5, 6, 7, 8, 9, or 10) atoms.
[1303] 142. The agent of any one of the preceding Embodiments, wherein the length of L^{P6} is a covalent bond.
[1304] 143. The agent of any one of the preceding Embodiments, wherein L^{AA6} is an optionally substituted, bivalent C₂-C₄ aliphatic group, wherein one or more methylene units of the group are optionally and independently replaced with —C(R′)₂—, —C(R′)(R^{AS})—, -Cy-, —O—, —S—, —S—S—, —N(R′)—, —C(O)—, —C(S)—, —C(NR′)—, —C(O)N(R′)—, —N(R′)C(O)N(R′)—, —N(R′)C(O)O—, —S(O)—, —S(O)₂—, —S(O)₂N(R′)—, —C(O)S—, or —C(O)O—.
[1305] 144. The agent of any one of the preceding Embodiments, wherein a methylene unit of L^{AA6} is replaced with —C(R′)(R^{AS})—, wherein R^{AS} is -L^{AS}-R^{AA6}, wherein L^{AS} is an optionally substituted, bivalent C₁-C₁₀ aliphatic group, wherein one or more methylene units of the group optionally and independently replaced with —C(R′)₂—, -Cy-, —O—, —S—, —S—S—, —N(R′)—, —C(O)—, —C(S)—, —C(NR′)—, —C(O)N(R′)—, —N(R′)C(O)N(R′)—, —N(R′)C(O)O—, —S(O)—, —S(O)₂—, —S(O)₂N(R′)—, —C(O)S—, or —C(O)O—.
[1306] 145. The agent of any one of the preceding Embodiments, wherein a methylene unit of L^{AA} is replaced with —C(R′)(R^{AS})—, wherein R^{AS} is -L^{AS}-R^{AA6}, wherein L^{AS} is an optionally substituted, bivalent C₁-C₁₀ aliphatic group, wherein one or more methylene units of the group optionally and independently replaced with —C(R′)₂—, -Cy-, —O—, —S—, —N(R′)—, —C(O)—, —S(O)—, or —S(O)₂—.
[1307] 146. The agent of any one of the preceding Embodiments, wherein a methylene unit of L^{AA6} is replaced with —C(R′)(R^{AS})—, wherein R^{AS} is -L^{AS}-R^{AA6}, wherein L^{AS} is an optionally substituted, bivalent C₁-C₁₀ aliphatic group, wherein one or more methylene units of the group optionally and independently replaced with —O—, —S—, or —N(R′)—.
[1308] 147. The agent of any one of the preceding Embodiments, wherein a methylene unit of L^{AA6} is replaced with —C(R′)(R^{AS})—, wherein R^{AS} is -L^{AS}-R^{AA6}, wherein L^{AS} is an optionally substituted, bivalent C₁-C₁₀ alkylene group.
[1309] 148. The agent of any one of the preceding Embodiments, wherein a methylene unit of L^{AA6} is replaced with —C(R′)(R^{AS})—, wherein R^{AS} is —CH₂—R^{AA6}.
[1310] 149. The agent of any one of the preceding Embodiments, wherein R^{AA6} is optionally substituted 6-14 membered aryl.
[1311] 150. The agent of any one of the preceding Embodiments, wherein R^{AA6} is optionally substituted phenyl.
[1312] 151. The agent of any one of the preceding Embodiments, wherein R^{AA6} is phenyl.
[1313] 152. The agent of any one of Embodiments 1-95, wherein R^{AA6} is optionally substituted 5-14 membered heteroaryl having 1−6 heteroatoms.
[1314] 153. The agent of any one of Embodiments 1-95, wherein R^{AA6} is optionally substituted 5-membered monocyclic heteroaryl having 1-4 heteroatoms.
[1315] 154. The agent of any one of Embodiments 1-95, wherein R^{AA6} is optionally substituted

[chemical structure]

[1316] 155. The agent of any one of Embodiments 1-95, wherein R^{AA6} is optionally substituted 9-membered bicyclic heteroaryl having 1-4 heteroatoms.
[1317] 156. The agent of any one of Embodiments 1-95, wherein R^{AA6} is optionally substituted 10-membered bicyclic heteroaryl having 1-4 heteroatoms.
[1318] 157. The agent of any one of Embodiments 1-95, wherein R^{AA6} is optionally substituted

[chemical structure]

[1319] 158. The agent of any one of Embodiments 1-95, wherein R^{AA6} is optionally substituted

[chemical structure]

[1320] 159. The agent of any one of the preceding Embodiments, wherein L^{AA6} is an amino acid residue.
[1321] 160. The agent of any one of the preceding Embodiments, wherein L^{AA6} is X¹³.
[1322] 161. The agent of any one of the preceding Embodiments, wherein L^{P7} is a covalent bond, or an optionally substituted, bivalent C₁-C₁₀ aliphatic or heteroaliphatic group having 1-10 heteroatoms, wherein one or more methylene units of the group are optionally and independently replaced with —C(R′)₂—, -Cy-, —O—, —S—, —S—S—, —N(R′)—, —C(O)—, —C(S)—, —C(NR′)—, —C(O)N(R′)—, —N(R′)C(O)N(R′)—, —N(R′)C(O)O—, —S(O)—, —S(O)₂—, —S(O)₂N(R′)—, —C(O)S—, or —C(O)O—.
[1323] 162. The agent of any one of the preceding Embodiments, wherein the length of L^{P7} is 0-20 (e.g., 0-15, 0-10, 0-5, 0, 1, 2, 3, 4, 5, 6, 7, 8, 9, 10, 11, 12, 13, 14, 15, 16, 17, 18, 19, or 20) atoms.
[1324] 163. The agent of any one of the preceding Embodiments, wherein L^{RN} is a covalent bond, or an optionally substituted, bivalent C₁-C₁₀ aliphatic or heteroaliphatic group having 1-10 heteroatoms, wherein one or more methylene units of the group are optionally and independently replaced with —C(R′)₂—, -Cy-, —O—, —S—, —S—S—, —N(R′)—, —C(O)—, —C(S)—, —C(NR′)—, —C(O)N(R′)—, —N(R′)C(O)N(R′)—, —N(R′)C(O)O—, —S(O)—, —S(O)₂—, —S(O)₂N(R′)—, —C(O)S—, or —C(O)O—.
[1325] 164. The agent of any one of the preceding Embodiments, wherein the length of L^{RN} is 0-20 (0, 1, 2, 3, 4, 5, 6, 7, 8, 9, 10, 11, 12, 13, 14, 15, 16, 17, 18, 19, or 20) atoms.
[1326] 165. The agent of any one of the preceding Embodiments, wherein R^{N} is R′-L^{RN}-, wherein R′ is —C(O)R, —CO₂R, or —SO₂R.
[1327] 166. The agent of any one of the preceding Embodiments, wherein R^{N} is R′, wherein R′ is —C(O)R, —CO₂R, or —SO₂R.
[1328] 167. The agent of any one of the preceding Embodiments, wherein L^{RC} is a covalent bond, or an optionally substituted, bivalent C₁-C₁₀ aliphatic or heteroaliphatic group having 1-10 heteroatoms, wherein one or more methylene units of the group are optionally and independently replaced with —C(R′)₂—, -Cy-, —O—, —S—, —S—S—, —N(R′)—, —C(O)—, —C(S)—, —C(NR′)—, —C(O)N(R′)—, —N(R′)C(O)N(R′)—, —N(R′)C(O)O—, —S(O)—, —S(O)₂—, —S(O)₂N(R′)—, —C(O)S—, or —C(O)O—.
[1329] 168. The agent of any one of the preceding Embodiments, wherein the length of L^{RC} is 0-20 (0, 1, 2, 3, 4, 5, 6, 7, 8, 9, 10, 11, 12, 13, 14, 15, 16, 17, 18, 19, or 20) atoms.
[1330] 169. The agent of any one of the preceding Embodiments, wherein R^{C} is —O-L^{RC}-R′ or —N(R′)-L^{RC}-R′.
[1331] 170. The agent of any one of the preceding Embodiments, wherein R^{C} is —OR′ or —N(R′)₂, wherein each R′ is independently R.
[1332] 171. The agent of any one of the preceding Embodiments, wherein the agent is or comprise a peptide.
[1333] 172. The agent of any one of the preceding Embodiments, wherein the agent is a peptide.
[1334] 173. The agent of any one of the preceding Embodiments, wherein the agent is or comprises a helix structure.
[1335] 174. An agent, wherein the agent is or comprise a peptide comprising:

X¹X²X³X⁴X⁵X⁶X⁷X⁸X⁹X¹⁰X¹¹X¹²X¹³[X¹⁴]ₚ₁₄[X¹⁵]ₚ₁₅[X¹⁶]ₚ₁₆[X¹⁷]ₚ₁₇,
[1336] wherein:
   [1337] each of p14, p15, p16 and p17 is independently 0 or 1;
   [1338] each of X¹, X², X³, X⁴, X⁵, X⁶, X⁷, X⁸, X⁹, X¹⁰, X¹¹, X¹², X¹³, X¹⁴, X¹⁵, X¹⁶, and X¹⁷ is independently an amino acid residue, wherein:
   [1339] X² comprises a side chain comprising an acidic or polar group;
   [1340] X⁵ comprises a side chain comprising an acidic or polar group;
   [1341] X⁹ comprises a side chain comprising an optionally substituted aromatic group;
   [1342] X² comprises a side chain comprising an optionally substituted aromatic group; and
   [1343] X¹³ comprises a side chain comprising an optionally substituted aromatic group.
[1344] 175. An agent, wherein the agent is or comprises:

X¹X²X³X⁴X⁵X⁶X⁷X⁸X⁹X¹⁰X¹¹X¹²X¹³[X¹⁴]ₚ₁₄[X¹⁵]ₚ₁₅[X¹⁶]ₚ₁₆[X¹⁷]ₚ₁₇[X¹⁸]p¹⁸[X¹⁹]ₚ₁₉[X²⁰]ₚ₂₀[X²¹]ₚ₂₁[X²²]ₚ₂₂[X²³]ₚ₂₃,
[1345] wherein each of p14, p15, p16, p17, p18, p19, p20, p21, p22, and p23 is independently 0 or 1, and each of X¹, X², X³, X⁴, X⁵, X⁶, X⁷, X⁸, X⁹, X¹⁰, X¹¹, X¹², X¹³, X¹⁴, X¹⁵, X¹⁶, X¹⁷, X¹⁸, X¹⁹, X²⁰, X²¹, X²², and X²³ is independently an amino acid residue.
[1346] 176. An agent, wherein the agent is or comprises:

[X]pX¹X²X³X⁴X⁵X⁶X⁷X⁸X⁹X¹⁰X¹¹X¹²X¹³[X¹⁴]ₚ₁₄[X¹⁵]ₚ₁₅[X¹⁶]ₚ₁₆[X¹⁷]ₚ₁₇[X]p′;
[1347] wherein:
   [1348] each of p14, p15, p¹⁶ and p17 is independently 0 or 1;
   [1349] each of p and p′ is independently 0-10;
   [1350] each of X, X¹, X², X³, X⁴, X⁵, X⁶, X⁷, X⁸, X⁹, X¹⁰, X¹¹, X¹², X¹³, X¹⁴, X¹⁵, X¹⁶, and X¹⁷ is independently an amino acid residue.
[1351] 177. An agent, wherein the agent is or comprise a peptide comprising:

X¹X²X³X⁴X⁵X⁶X⁷X⁸X⁹X¹⁰X¹¹X¹²X¹³[X¹⁴]ₚ₁₄[X¹⁵]ₚ₁₅[X¹⁶]ₚ₁₆[X¹⁷]ₚ₁₇,
[1352] wherein:
   [1353] each of p14, p15, p16 and p17 is independently 0 or 1;
   [1354] each of X¹, X², X³, X⁴, X⁵, X⁶, X⁷, X⁸, X⁹, X¹⁰, X¹¹, X¹², X¹³, X¹⁴, X¹⁵, X¹⁶, and X¹⁷ is independently an amino acid residue, wherein:
   [1355] X² comprises a side chain comprising an acidic or polar group;
   [1356] X⁵ comprises a side chain comprising an acidic or polar group;
   [1357] X⁹ comprises a side chain comprising an optionally substituted aromatic group;
   [1358] X² comprises a side chain comprising an optionally substituted aromatic group;
   [1359] X¹³ comprises a side chain comprising an optionally substituted aromatic group; and wherein:
   [1360] X¹ and X⁴, and/or X⁴ and X¹¹ are independently amino acid residues suitable for stapling, or are stapled, or X³ and X¹⁰ are independently amino acid residues suitable for stapling, or are stapled.
[1361] 178. The agent of Embodiment 174, wherein X¹ and X⁴, and X⁴ and X¹¹ are independently amino acid residues suitable for stapling.
[1362] 179. The agent of Embodiment 174, wherein X¹ and X⁴, and X⁴ and X¹¹ are independently stapled.
[1363] 180. The agent of any one of Embodiments 1-173, where the agent is an agent of any one of Embodiments 174-179.
[1364] 181. The agent of any one of the preceding Embodiments, comprising a staple having the structure of LS which is -L^{s1}-L^{s2}-L^{s3}-.
[1365] 182. The agent of any one of the preceding Embodiments, wherein there are two staples in the agent each independently having the structure of L^{s} which is -L^{s1}-L^{s2}-L^{s3}-.
[1366] 183. The agent of any one of Embodiments 181-182, wherein L^{s1} is a covalent bond, or an optionally substituted bivalent linear or branched, saturated or partially unsaturated C₁₋₁₀ hydrocarbon chain, wherein one or more methylene units are optionally and independently replaced with —C(R′)₂—, -Cy-, —O—, —S—, —S—S—, —S-Cy-S—, —N(R′)—, —C(O)—, —C(S)—, —C(NR′)—, —C(O)N(R′)—, —N(R′)C(O)N(R′)—, —N(R′)C(O)O—, —S(O)—, —S(O)₂—, —S(O)₂N(R′)—, —C(O)S—, or —C(O)O—.
[1367] 184. The agent of Embodiment 183, wherein L^{s1} is an optionally substituted bivalent linear or branched, saturated or partially unsaturated C₁₋₁₀ hydrocarbon chain, wherein one or more methylene units are optionally and independently replaced with —C(R′)₂—, -Cy-, —O—, —S—, —S—S—, —S-Cy-S—, —N(R′)—, —C(O)—, —C(S)—, —C(NR′)—, —C(O)N(R′)—, —N(R′)C(O)N(R′)—, —N(R′)C(O)O—, —S(O)—, —S(O)₂—, —S(O)₂N(R′)—, —C(O)S—, or —C(O)O—.
[1368] 185. The agent of Embodiment 183, wherein L^{s1} is an optionally substituted bivalent linear or branched, saturated or partially unsaturated C₁₋₆ hydrocarbon chain, wherein one or more methylene units are optionally and independently replaced with —O—, -Cy-, —S—, —N(R′)—, —C(O)—, —C(O)N(R′)—, or —N(R′)C(O)O—.
[1369] 186. The agent of Embodiment 183, wherein L^{s1} is a bivalent C₁₋₆ aliphatic wherein one or more methylene units are optionally and independently replaced with —O—, —S—, —N(R′)—, —C(O)—, —C(O)N(R′)—, or —N(R′)C(O)O—.
[1370] 187. The agent of any one of Embodiments 184-186, wherein L^{s1} comprises —N(R′)—.
[1371] 188. The agent of any one of Embodiments 184-186, wherein L^{s1} comprises —N(R′)C(O)O—.
[1372] 189. The agent of Embodiment 188, wherein —N(R′)— is closer to L^{s2}.
[1373] 190. The agent of Embodiment 188, wherein —O— is closer to L^{s2}.
[1374] 191. The agent of any one of Embodiments 184-186, wherein L^{s1} is —(CH₂)m-N(R′)—(CH₂)ₙ—, wherein each of m and n is independently 1, 2, 3, 4, 5, 6, 7, 8, 9, or 10.
[1375] 192. The agent of any one of Embodiments 184-186, wherein L^{s1} is —(CH₂)m-N(R′)—C(O)—O—(CH₂)ₙ—, wherein each of m and n is independently 1, 2, 3, 4, 5, 6, 7, 8, 9, or 10.
[1376] 193. The agent of any one of Embodiments 191-192, wherein —(CH₂)m- is bonded L^{s2}.
[1377] 194. The agent of any one of Embodiments 191-192, wherein —(CH₂)ₙ— is bonded L^{s2}.
[1378] 195. The agent of any one of Embodiments 191-194, wherein m is 1.
[1379] 196. The agent of any one of Embodiments 191-194, wherein m is 2.
[1380] 197. The agent of any one of Embodiments 191-196, wherein n is 3.
[1381] 198. The agent of any one of Embodiments 187-197, wherein R′ is —H.
[1382] 199. The agent of any one of Embodiments 187-197, wherein R′ is optionally substituted C₁₋₆ aliphatic.
[1383] 200. The agent of any one of Embodiments 187-197, wherein R′ is methyl.
[1384] 201. The agent of any one of Embodiments 187-197, wherein R′ is taken together with R^{a3} of the amino acid residue to which L^{s1} is bonded to and their intervening atom(s) to form an optionally substituted 3-10 membered ring having 0-5 heteroatoms in addition to the intervening atom(s).
[1385] 202. The agent of Embodiment 201, wherein R′ is taken together with R^{a3} of the amino acid residue to which L^{s3} is bonded to and their intervening atom(s) to form a 3-10 membered monocyclic ring having 0-5 heteroatoms in addition to the intervening atom(s).
[1386] 203. The agent of any one of Embodiments 201-202, wherein the formed ring is saturated.
[1387] 204. The agent of any one of Embodiments 201-203, wherein the formed ring is 4-membered.
[1388] 205. The agent of any one of Embodiments 201-203, wherein the formed ring is 5-membered.
[1389] 206. The agent of any one of Embodiments 201-205, wherein the formed ring has no heteroatoms in addition to the intervening atom(s).
[1390] 207. The agent of Embodiment 183, wherein L^{s1} is optionally substituted —(CH₂)ₙ—, wherein n is 1, 2, 3, 4, 5, or 6.
[1391] 208. The agent of Embodiment 183, wherein L^{s1} is —(CH₂)ₙ—, wherein n is 1, 2, 3, 4, 5, or 6.
[1392] 209. The agent of Embodiment 183, wherein L^{s1} is —CH₂—.
[1393] 210. The agent of Embodiment 183, wherein L^{s1} is optionally substituted —(CH₂)ₙ—C(O)—, wherein n is 1, 2, 3, 4, 5, or 6.
[1394] 211. The agent of Embodiment 183, wherein L^{s1} is —(CH₂)ₙ—C(O)—, wherein n is 1, 2, 3, 4, 5, or 6.
[1395] 212. The agent of Embodiment 183, wherein L^{s1} is —(CH₂)ₙ—C(O)—, wherein n is 2 or 3.
[1396] 213. The agent of any one of Embodiments 181-212, wherein L^{s1} is bonded to an amino acid residue closer to the N-terminus than an amino acid residue to which -L^{s3}- is bond.
[1397] 214. The agent of any one of Embodiments 181-213, wherein L^{s1} is bond to a carbon atom of the peptide backbone.
[1398] 215. The agent of any one of Embodiments 181-214, wherein L^{s1} is bond to an alpha carbon atom of an amino acid residue.
[1399] 216. The agent of any one of Embodiments 181-213, wherein L^{s1} is bond to a nitrogen atom of the peptide backbone.
[1400] 217. The agent of any one of Embodiments 181-213, wherein L^{s1} is bond to a nitrogen atom of the peptide backbone, wherein the nitrogen atom is of an amino group bonded to an alpha carbon atom of an amino acid residue.
[1401] 218. The agent of any one of Embodiments 216-217, wherein the nitrogen atom is bond to —C(O)— of L^{s1}.
[1402] 219. The agent of any one of Embodiments 181-218, wherein L^{s2} is a covalent bond, or an optionally substituted bivalent linear or branched, saturated or partially unsaturated C₁₋₁₀ hydrocarbon chain, wherein one or more methylene units are optionally and independently replaced with —C(R′)₂—, -Cy-, —O—, —S—, —S—S—, —S-Cy-S—, —N(R′)—, —C(O)—, —C(S)—, —C(NR′)—, —C(O)N(R′)—, —N(R′)C(O)N(R′)—, —N(R′)C(O)O—, —S(O)—, —S(O)₂—, —S(O)₂N(R′)—, —C(O)S—, or —C(O)O—.
[1403] 220. The agent of any one of Embodiments 181-218, wherein L^{s2} is an optionally substituted bivalent linear or branched, saturated or partially unsaturated C₁₋₁₀ hydrocarbon chain, wherein one or more methylene units are optionally and independently replaced with —C(R′)₂—, -Cy-, —O—, —S—, —S—S—, —S—Cy-S—, —N(R′)—, —C(O)—, —C(S)—, —C(NR′)—, —C(O)N(R′)—, —N(R′)C(O)N(R′)—, —N(R′)C(O)O—, —S(O)—, —S(O)₂—, —S(O)₂N(R′)—, —C(O)S—, or —C(O)O—.
[1404] 221. The agent of Embodiment 220, wherein L^{s2} is optionally substituted —CH═CH—.
[1405] 222. The agent of Embodiment 220, wherein L^{s2} is —CH═CH—.
[1406] 223. The agent of Embodiment 220, wherein the double bond is E.
[1407] 224. The agent of Embodiment 220, wherein the double bond is Z.
[1408] 225. The agent of Embodiment 220, wherein L^{s2} is optionally substituted —CH₂—CH₂—.
[1409] 226. The agent of Embodiment 220, wherein L^{s2} is —CH₂—CH₂—.
[1410] 227. The agent of Embodiment 220, wherein L^{s2} is -Cy-.
[1411] 228. The agent of Embodiment 227, wherein -Cy- is optionally substituted saturated or partially unsaturated 5−6 membered ring having 0-4 heteroatoms.
[1412] 229. The agent of Embodiment 227, wherein -Cy- is optionally substituted phenyl ring.
[1413] 230. The agent of Embodiment 227, wherein -Cy- is optionally substituted 5−6 membered aromatic ring having 1-4 heteroatoms.
[1414] 231. The agent of Embodiment 227, wherein -Cy- is optionally substituted

[chemical structure]

[1415] 232. The agent of Embodiment 227, wherein -Cy- is

[chemical structure]

[1416] 233. The agent of any one of Embodiments 231-232, wherein the carbon atom is bonded to L^{s1}.
[1417] 234. The agent of any one of Embodiments 231-232, wherein the carbon atom is bonded to L^{s3}.
[1418] 235. The agent of Embodiment 220, wherein L^{s2} is —C(O)N(R′)—.
[1419] 236. The agent of Embodiment 235, wherein R′ is —H.
[1420] 237. The agent of Embodiment 235, wherein R′ is optionally substituted C₁₋₆ aliphatic.
[1421] 238. The agent of any one of Embodiments 235-237, wherein the —N(R′)— is bonded to L^{s1}.
[1422] 239. The agent of any one of Embodiments 235-237, wherein the —N(R′)— is bonded to L^{s3}.
[1423] 240. The agent of Embodiment 220, wherein one or more methylene units are independently replaced with —C(O)N(R′)— or —N(R′)—, and one or more methylene units are independently replaced with —C(R′)₂—, wherein one or more R′ of one or more —C(R′)₂— are each independently taken together with R′ of —C(O)N(R′)— or —N(R′)— and their intervening atom(s) to form an optionally substituted 3-10 membered ring having 0-5 heteroatoms in addition to the intervening atom(s).
[1424] 241. The agent of Embodiment 240, wherein the formed ring is saturated.
[1425] 242. The agent of any one of Embodiments 240-241, wherein the formed ring is 4-membered.
[1426] 243. The agent of any one of Embodiments 240-242, wherein the formed ring is 5-membered.
[1427] 244. The agent of any one of Embodiments 240-243, wherein the formed ring has no heteroatoms in addition to the intervening atom(s).
[1428] 245. The agent of Embodiment 220, wherein L^{s2} is —S-L″—S—.
[1429] 246. The agent of Embodiment 245, wherein L″ is a covalent bond, or an optionally substituted bivalent linear or branched, saturated or partially unsaturated C₁₋₁₀ hydrocarbon chain, wherein one or more methylene units are optionally and independently replaced with —C(R′)₂—, -Cy-, —O—, —S—, —S—S—, —S-Cy-S—, —N(R′)—, —C(O)—, —C(S)—, —C(NR′)—, —C(O)N(R′)—, —N(R′)C(O)N(R′)—, —N(R′)C(O)O—, —S(O)—, —S(O)₂—, —S(O)₂N(R′)—, —C(O)S—, or —C(O)O—.
[1430] 247. The agent of Embodiment 245, wherein L″ is an optionally substituted bivalent linear or branched, saturated or partially unsaturated C₁₋₁₀ hydrocarbon chain, wherein one or more methylene units are optionally and independently replaced with —C(R′)₂—, -Cy-, —O—, —S—, —S—S—, —S-Cy-S—, —N(R′)—, —C(O)—, —C(S)—, —C(NR′)—, —C(O)N(R′)—, —N(R′)C(O)N(R′)—, —N(R′)C(O)O—, —S(O)—, —S(O)₂—, —S(O)₂N(R′)—, —C(O)S—, or —C(O)O—.
[1431] 248. The agent of Embodiment 245, wherein L″ is or comprise -Cy-.
[1432] 249. The agent of Embodiment 245, wherein L″ is or comprise —(CH₂)m-Cy-(CH₂)ₙ—, wherein each m and n is optionally substituted 0 1, 2, 3, 4, 5, 6, 7, 8, 9, or 10, and each —CH₂— is optionally substituted.
[1433] 250. The agent of Embodiment 249, wherein each m and n is independently 1.
[1434] 251. The agent of any one of Embodiments 248-250, wherein is optionally substituted phenyl.
[1435] 252. The agent of any one of Embodiments 248-250, wherein is optionally substituted 5−6 membered aromatic ring having 1-4 heteroatoms.
[1436] 253. The agent of any one of Embodiments 181-252, wherein L^{s3} is a covalent bond, or an optionally substituted bivalent linear or branched, saturated or partially unsaturated C₁₋₁₀ hydrocarbon chain, wherein one or more methylene units are optionally and independently replaced with —C(R′)₂—, -Cy-, —O—, —S—, —S—S—, —S-Cy-S—, —N(R′)—, —C(O)—, —C(S)—, —C(NR′)—, —C(O)N(R′)—, —N(R′)C(O)N(R′)—, —N(R′)C(O)O—, —S(O)—, —S(O)₂—, —S(O)₂N(R′)—, —C(O)S—, or —C(O)O—.
[1437] 254. The agent of Embodiment 253, wherein L^{s3} is an optionally substituted bivalent linear or branched, saturated or partially unsaturated C₁₋₁₀ hydrocarbon chain, wherein one or more methylene units are optionally and independently replaced with —C(R′)₂—, -Cy-, —O—, —S—, —S—S—, —S-Cy-S—, —N(R′)—, —C(O)—, —C(S)—, —C(NR′)—, —C(O)N(R′)—, —N(R′)C(O)N(R′)—, —N(R′)C(O)O—, —S(O)—, —S(O)₂—, —S(O)₂N(R′)—, —C(O)S—, or —C(O)O—.
[1438] 255. The agent of Embodiment 253, wherein L^{s3} is an optionally substituted bivalent linear or branched, saturated or partially unsaturated C₁₋₆ hydrocarbon chain, wherein one or more methylene units are optionally and independently replaced with —O—, -Cy-, —S—, —N(R′)—, —C(O)—, —C(O)N(R′)—, or —N(R′)C(O)O—.
[1439] 256. The agent of Embodiment 253, wherein L^{s3} is a bivalent C₁₋₆ aliphatic wherein one or more methylene units are optionally and independently replaced with —O—, —S—, —N(R′)—, —C(O)—, —C(O)N(R′)—, or —N(R′)C(O)O—.
[1440] 257. The agent of any one of Embodiments 254-256, wherein L^{s3} comprises —N(R′)—.
[1441] 258. The agent of any one of Embodiments 254-256, wherein L^{s3} comprises —N(R′)C(O)O—.
[1442] 259. The agent of Embodiment 258, wherein —N(R′)— is closer to L^{s2}.
[1443] 260. The agent of Embodiment 258, wherein —O— is closer to L^{s2}
[1444] 261. The agent of any one of Embodiments 254-256, wherein L^{s3} is —(CH₂)m-N(R′)—(CH₂)ₙ—, wherein each of m and n is independently 1, 2, 3, 4, 5, 6, 7, 8, 9, or 10.
[1445] 262. The agent of any one of Embodiments 254-256, wherein L^{s3} is —(CH₂)m-N(R′)—C(O)—O—(CH₂)ₙ—, wherein each of m and n is independently 1, 2, 3, 4, 5, 6, 7, 8, 9, or 10.
[1446] 263. The agent of any one of Embodiments 261-262, wherein —(CH₂)ₙ— is bonded L^{s2}
[1447] 264. The agent of any one of Embodiments 261-262, wherein —(CH₂)m- is bonded L^{s2}.
[1448] 265. The agent of any one of Embodiments 261-264, wherein m is 1.
[1449] 266. The agent of any one of Embodiments 261-264, wherein m is 2.
[1450] 267. The agent of any one of Embodiments 261-266, wherein n is 3.
[1451] 268. The agent of any one of Embodiments 257-267, wherein R′ is —H.
[1452] 269. The agent of any one of Embodiments 257-267, wherein R′ is optionally substituted C₁₋₆ aliphatic.
[1453] 270. The agent of any one of Embodiments 257-267, wherein R′ is methyl.
[1454] 271. The agent of any one of Embodiments 257-267, wherein R′ is taken together with R^{a3} of the amino acid residue to which L^{s3} is bonded to and their intervening atom(s) to form an optionally substituted 3-10 membered ring having 0-5 heteroatoms in addition to the intervening atom(s).
[1455] 272. The agent of any one of Embodiments 257-267, wherein R′ is taken together with R^{a3} of the amino acid residue to which L^{s3} is bonded to and their intervening atom(s) to form a 3-10 membered monocyclic ring having 0-5 heteroatoms in addition to the intervening atom(s).
[1456] 273. The agent of any one of Embodiments 271-272, wherein the formed ring is saturated.
[1457] 274. The agent of any one of Embodiments 271-273, wherein the formed ring is 4-membered.
[1458] 275. The agent of any one of Embodiments 271-274, wherein the formed ring is 5-membered.
[1459] 276. The agent of any one of Embodiments 271-275, wherein the formed ring has no heteroatoms in addition to the intervening atom(s).
[1460] 277. The agent of Embodiment 253, wherein L^{s3} is optionally substituted —(CH₂)ₙ—, wherein n is 1, 2, 3, 4, 5, or 6.
[1461] 278. The agent of Embodiment 253, wherein L^{s3} is —(CH₂)ₙ—, wherein n is 1, 2, 3, 4, 5, or 6.
[1462] 279. The agent of Embodiment 253, wherein L^{s3} is —(CH₂)₃—.
[1463] 280. The agent of Embodiment 253, wherein L^{s3} is —(CH₂)₂—.
[1464] 281. The agent of Embodiment 253, wherein L^{s3} is —CH₂—.
[1465] 282. The agent of Embodiment 253, wherein L^{s3} is optionally substituted —(CH₂)ₙ—C(O)—, wherein n is 1, 2, 3, 4, 5, or 6.
[1466] 283. The agent of Embodiment 253, wherein L^{s3} is —(CH₂)ₙ—C(O)—, wherein n is 1, 2, 3, 4, 5, or 6.
[1467] 284. The agent of Embodiment 253, wherein L^{s3} is —(CH₂)ₙ—C(O)—, wherein n is 2 or 3.
[1468] 285. The agent of any one of Embodiments 181-284, wherein L^{s3} is bonded to an amino acid residue closer to the N-terminus than an amino acid residue to which -L^{s3}- is bond.
[1469] 286. The agent of any one of Embodiments 181-285, wherein L^{s3} is bond to a carbon atom of the peptide backbone.
[1470] 287. The agent of any one of Embodiments 181-286, wherein L^{s3} is bond to an alpha carbon atom of an amino acid residue.
[1471] 288. The agent of any one of Embodiments 181-285, wherein L^{s3} is bond to a nitrogen atom of the peptide backbone.
[1472] 289. The agent of any one of Embodiments 181-285, wherein L^{s3} is bond to a nitrogen atom of the peptide backbone, wherein the nitrogen atom is of an amino group bonded to an alpha carbon atom of an amino acid residue.
[1473] 290. The agent of any one of Embodiments 288-289, wherein the nitrogen atom is bond to —C(O)— of L^{s3}.
[1474] 291. The agent of any one of Embodiments 181-290, wherein a staple is optionally substituted —CH₂—CH═CH—(CH₂)₃—.
[1475] 292. The agent of any one of Embodiments 181-290, wherein a staple is —CH₂—CH═CH—(CH₂)₃—.
[1476] 293. The agent of Embodiment 291-292, wherein —CH═CH— is E.
[1477] 294. The agent of Embodiment 291-292, wherein —CH═CH— is Z.
[1478] 295. The agent of any one of Embodiments 181-290, wherein a staple is optionally substituted —CH₂—CH═CH—(CH₂)₃—C(O)—.
[1479] 296. The agent of any one of Embodiments 181-290, wherein a staple is —CH₂—CH═CH—(CH₂)₃—C(O)—.
[1480] 297. The agent of any one of Embodiments 181-290, wherein a staple is optionally substituted —CH₂—CH═CH—(CH₂)₂—C(O)—.
[1481] 298. The agent of any one of Embodiments 181-290, wherein a staple is —CH₂—CH═CH—(CH₂)₂—C(O)—.
[1482] 299. The agent of Embodiment 295-298, wherein —CH═CH— is E.
[1483] 300. The agent of Embodiment 295-298, wherein —CH═CH— is Z.
[1484] 301. The agent of any one of Embodiments 181-290, wherein a staple is optionally substituted —(CH₂)ₙ—, wherein n is 1-20.
[1485] 302. The agent of any one of Embodiments 181-290, wherein a staple is —(CH₂)ₙ—, wherein n is 1-20.
[1486] 303. The agent of any one of Embodiments 181-290, wherein a staple is optionally substituted —(CH₂)ₙ—CO—, wherein n is 1-20.
[1487] 304. The agent of any one of Embodiments 181-290, wherein a staple is —(CH₂)ₙ—C(O)—, wherein n is 1-20.
[1488] 305. The agent of Embodiment 301-304, wherein n is 4-10.
[1489] 306. The agent of Embodiment 301-304, wherein n is 5-8.
[1490] 307. The agent of Embodiment 301-304, wherein n is 6.
[1491] 308. The agent of any one of Embodiments 291-307, wherein optionally substituted —(CH₂)₃— or —C(O)— is bonded to an amino acid residue closer to a N-terminus to the other amino acid residue bonded to the same staple.
[1492] 309. The agent of any one of Embodiments 291-308, wherein optionally substituted —(CH₂)₃— or —C(O)— is bonded to an alpha-carbon atom of an amino acid residue.
[1493] 310. The agent of any one of Embodiments 291-308, wherein optionally substituted —(CH₂)₃— or —C(O)— is bonded to a nitrogen atom of an amino acid residue.
[1494] 311. The agent of any one of Embodiments 291-308, wherein optionally substituted —(CH₂)₃— or —C(O)— is bonded to a nitrogen atom bonded to an alpha carbon atom of an amino acid residue.
[1495] 312. The agent of any one of Embodiments 291-311, wherein optionally substituted —(CH₂)₃— or —C(O)— is bonded to X¹.
[1496] 313. The agent of Embodiment 312, wherein the other amino acid residue bonded to the staple is X⁴.
[1497] 314. The agent of any one of Embodiments 181-313, wherein a staple is —(CH₂)m-N(R′)—(CH₂)ₙ—CH═CH—(CH₂)n′-, wherein each of m, n and n′ is independently 1, 2, 3, 4, 5, 6, 7, 8, 9, or 10, and each —CH₂— is independently optionally substituted.
[1498] 315. The agent of any one of Embodiments 181-313, wherein a staple is —(CH₂)m-N(R′)—(CH₂)ₙ—CH═CH—(CH₂)n′-, wherein each of m, n and n′ is independently 1, 2, 3, 4, 5, 6, 7, 8, 9, or 10.
[1499] 316. The agent of any one of Embodiments 181-315, wherein a staple is —(CH₂)m-N(R′)—C(O)—O—(CH₂)ₙ—CH═CH—(CH₂)n′-, wherein each of m, n and n′ is independently 1, 2, 3, 4, 5, 6, 7, 8, 9, or 10, and each —CH₂— is independently optionally substituted.
[1500] 317. The agent of any one of Embodiments 181-315, wherein a staple is —(CH₂)m-N(R′)—C(O)—O—(CH₂)ₙ—CH═CH—(CH₂)n′-, wherein each of m, n and n′ is independently 1, 2, 3, 4, 5, 6, 7, 8, 9, or 10.
[1501] 318. The agent of any one of Embodiments 314-317, wherein the —CH═CH— is E.
[1502] 319. The agent of any one of Embodiments 314-317, wherein the —CH═CH— is Z.
[1503] 320. The agent of any one of Embodiments 181-319, wherein a staple is —(CH₂)m-N(R′)—(CH₂)ₙ—CH₂—CH₂—(CH₂)n′-, wherein each of m, n and n′ is independently 1, 2, 3, 4, 5, 6, 7, 8, 9, or 10, and each —CH₂— is independently optionally substituted.
[1504] 321. The agent of any one of Embodiments 181-320, wherein a staple is —(CH₂)m-N(R′)—(CH₂)ₙ—CH₂—CH₂—(CH₂)n′-, wherein each of m, n and n′ is independently 1, 2, 3, 4, 5, 6, 7, 8, 9, or 10.
[1505] 322. The agent of any one of Embodiments 181-321, wherein a staple is —(CH₂)m-N(R′)—C(O)—O—(CH₂)ₙ—CH₂—CH₂—(CH₂)n′-, wherein each of m, n and n′ is independently 1, 2, 3, 4, 5, 6, 7, 8, 9, or 10, and each —CH₂— is independently optionally substituted.
[1506] 323. The agent of any one of Embodiments 181-322, wherein a staple is —(CH₂)m-N(R′)—C(O)—O—(CH₂)ₙ—CH₂—CH₂—(CH₂)n′-, wherein each of m, n and n′ is independently 1, 2, 3, 4, 5, 6, 7, 8, 9, or 10.
[1507] 324. The agent of any one of Embodiments 314-323, wherein —(CH₂)m- is bonded an amino acid residue closer to a N-terminus to the other amino acid residue bonded to the same staple.
[1508] 325. The agent of any one of Embodiments 314-323, wherein —(CH₂)m- is bonded an amino acid residue closer to a C-terminus to the other amino acid residue bonded to the same staple.
[1509] 326. The agent of any one of Embodiments 314-325, wherein m is 1.
[1510] 327. The agent of any one of Embodiments 314-325, wherein m is 2.
[1511] 328. The agent of any one of Embodiments 314-327, wherein n is 1.
[1512] 329. The agent of any one of Embodiments 314-327, wherein n is 2.
[1513] 330. The agent of any one of Embodiments 314-327, wherein n is 3.
[1514] 331. The agent of any one of Embodiments 314-330, wherein n′ is 3.
[1515] 332. The agent of any one of Embodiments 314-331, wherein R′ is —H.
[1516] 333. The agent of any one of Embodiments 314-331, wherein R′ is optionally substituted C₁₋₆ aliphatic.
[1517] 334. The agent of any one of Embodiments 314-331, wherein R′ is methyl.
[1518] 335. The agent of any one of Embodiments 314-331, wherein R′ is taken together with R^{a3} of the amino acid residue to which L^{s3} is bonded to and their intervening atom(s) to form an optionally substituted 3-10 membered ring having 0-5 heteroatoms in addition to the intervening atom(s).
[1519] 336. The agent of any one of Embodiments 314-331, wherein R′ is taken together with R^{a3} of the amino acid residue to which L^{s3} is bonded to and their intervening atom(s) to form a 3-10 membered monocyclic ring having 0-5 heteroatoms in addition to the intervening atom(s).
[1520] 337. The agent of any one of Embodiments 335-336, wherein the formed ring is saturated.
[1521] 338. The agent of any one of Embodiments 335-337, wherein the formed ring is 4-membered.
[1522] 339. The agent of any one of Embodiments 335-338, wherein the formed ring is 5-membered.
[1523] 340. The agent of any one of Embodiments 335-339, wherein the formed ring has no heteroatoms in addition to the intervening atom(s).
[1524] 341. The agent of any one of Embodiments 181-340, wherein a staple is optionally substituted —*CH₂—N(—CH₂—**CH₂—)—C(O)O—(CH₂)₃—CH═CH—(CH₂)₃—, wherein —*CH₂— and —**CH₂— are bonded to the same amino acid residue.
[1525] 342. The agent of any one of Embodiments 181-340, wherein a staple is —*CH₂—N(—CH₂—**CH₂—)—C(O)O—(CH₂)₃—CH═CH—(CH₂)₃—, wherein —*CH₂— and —**CH₂— are bonded to the same amino acid residue.
[1526] 343. The agent of Embodiment 341-342, wherein —CH═CH— is E.
[1527] 344. The agent of Embodiment 341-342, wherein —CH═CH— is Z.
[1528] 345. The agent of any one of Embodiments 181-340, wherein a staple is optionally substituted —*CH₂—N(—CH₂—**CH₂—)—C(O)O—(CH₂)₃—CH₂—CH₂—(CH₂)₃—, wherein —*CH₂— and —**CH₂— are bonded to the same amino acid residue.
[1529] 346. The agent of any one of Embodiments 181-340, wherein a staple is —*CH₂—N(—CH₂—**CH₂—)—C(O)O—(CH₂)₃—CH₂—CH₂—(CH₂)₃—, wherein —*CH₂— and —**CH₂— are bonded to the same amino acid residue.
[1530] 347. The agent of any one of Embodiments 341-346, wherein —*CH₂— and —**CH₂— are bonded to the same atom.
[1531] 348. The agent of any one of Embodiments 314-347, wherein optionally substituted —(CH₂)m or —*CH₂— is bonded to an amino acid residue closer to a C-terminus to the other amino acid residue bonded to the same staple.
[1532] 349. The agent of any one of Embodiments 314-348, wherein optionally substituted —(CH₂)m or —*CH₂— is bonded to an alpha-carbon atom of an amino acid residue.
[1533] 350. The agent of any one of Embodiments 314-349, wherein optionally substituted —(CH₂)m or —*CH₂— is bonded to X¹¹.
[1534] 351. The agent of Embodiment 350, wherein the other amino acid residue bonded to the staple is X⁴. 352. The agent of any one of Embodiments 181-313, wherein a staple is optionally substituted —(CH₂)m-CH═CH—(CH₂)ₙ—.
[1535] 353. The agent of any one of Embodiments 181-313, wherein a staple is —(CH₂)m-CH═CH—(CH₂)ₙ—.
[1536] 354. The agent of any one of Embodiments 181-313, wherein a staple is optionally substituted —(CH₂)m-CH₂—CH₂—(CH₂)ₙ—.
[1537] 355. The agent of any one of Embodiments 181-313, wherein a staple is —(CH₂)m-CH₂—CH₂—(CH₂)ₙ—.
[1538] 356. The agent of any one of Embodiments 352-355, wherein m is 1.
[1539] 357. The agent of any one of Embodiments 352-355, wherein m is 2.
[1540] 358. The agent of any one of Embodiments 352-355, wherein m is 3.
[1541] 359. The agent of any one of Embodiments 352-355, wherein m is 4.
[1542] 360. The agent of any one of Embodiments 352-355, wherein m is 5.
[1543] 361. The agent of any one of Embodiments 352-355, wherein m is 6.
[1544] 362. The agent of any one of Embodiments 352-355, wherein m is 7.
[1545] 363. The agent of any one of Embodiments 352-355, wherein m is 8.
[1546] 364. The agent of any one of Embodiments 352-363, wherein n is 1.
[1547] 365. The agent of any one of Embodiments 352-363, wherein n is 2.
[1548] 366. The agent of any one of Embodiments 352-363, wherein n is 3.
[1549] 367. The agent of any one of Embodiments 352-363, wherein n is 4.
[1550] 368. The agent of any one of Embodiments 352-363, wherein n is 5.
[1551] 369. The agent of any one of Embodiments 352-363, wherein n is 6.
[1552] 370. The agent of any one of Embodiments 352-363, wherein n is 7.
[1553] 371. The agent of any one of Embodiments 352-363, wherein n is 8.
[1554] 372. The agent of any one of Embodiments 352-371, wherein the staple is boned to X⁴ and X¹¹.
[1555] 373. The agent of any one of the preceding Embodiments, wherein a staple has a length of 5-10 chain atoms.
[1556] 374. The agent of Embodiment 373, wherein the length is 5 chain atoms.
[1557] 375. The agent of Embodiment 373, wherein the length is 6 chain atoms.
[1558] 376. The agent of Embodiment 373, wherein the length is 7 chain atoms.
[1559] 377. The agent of any one of Embodiments 373-376, wherein the staple is a (i, i+3) staple.
[1560] 378. The agent of any one of the preceding Embodiments, wherein a staple has a length of 10-25 chain atoms.
[1561] 379. The agent of Embodiment 378, wherein the length is 12 chain atoms.
[1562] 380. The agent of Embodiment 378, wherein the length is 13 chain atoms.
[1563] 381. The agent of Embodiment 378, wherein the length is 14 chain atoms.
[1564] 382. The agent of any one of Embodiments 378-381, wherein the staple is a (i, i+7) staple.
[1565] 383. The agent of any one of the any one of the preceding Embodiments, wherein X¹ is a residue of an amino acid having the structure of formula A-I, A-II or A-III, wherein R^{a2} and R^{a3} are taken together with their intervening atom(s) to form an optionally substituted 3-10 membered ring having 0-5 heteroatoms in addition to the intervening atom(s).
[1566] 384. The agent of any one of the preceding Embodiments, wherein X¹ is —N(R^{a1})-L^{a1}-C(-L^{a}-R^{SP})(R^{a3})-L^{a2}-C(O)—.
[1567] 385. The agent of Embodiment 384, wherein R^{a1} is —H.
[1568] 386. The agent of any one of Embodiments 384-385, wherein R^{a3} is —H.
[1569] 387. The agent of any one of Embodiments 384-385, wherein R^{a3} is optionally substituted C₁₋₆ aliphatic.
[1570] 388. The agent of Embodiment 384, wherein R^{a1} and R^{a3} are taken together with their intervening atom(s) to form an optionally substituted 3-10 membered ring having 0-3 heteroatoms in addition to the intervening atom(s).
[1571] 389. The agent of Embodiment 388, wherein R^{a1} and R^{a3} are taken together with their intervening atom(s) to form an 5-membered saturated ring having no heteroatoms in addition to the nitrogen to which R^{a1} is attached.
[1572] 390. The agent of any one of Embodiments 384-389, wherein L^{a1} is a covalent bond.
[1573] 391. The agent of any one of Embodiments 384-390, wherein L^{a} is a covalent bond or an optionally substituted bivalent C₁₋₁₀ aliphatic wherein one or more methylene units are optionally and independently replaced with —O—, —S—, -Cy-, —N(R′)—, —C(O)—, —C(O)N(R′)—, or —N(R′)C(O)O—.
[1574] 392. The agent of any one of Embodiments 384-390, wherein L^{a} is an optionally substituted bivalent C₁₋₁₀ aliphatic wherein one or more methylene units are optionally and independently replaced with —O—, —S—, -Cy-, —N(R′)—, —C(O)—, —C(O)N(R′)—, or —N(R′)C(O)O—.
[1575] 393. The agent of any one of Embodiments 384-390, wherein L^{a} is a bivalent C₁₋₆ aliphatic wherein one or more methylene units are optionally and independently replaced with —O—, —S—, —N(R′)—, —C(O)—, —C(O)N(R′)—, or —N(R′)C(O)O—.
[1576] 394. The agent of any one of Embodiments 384-391, wherein L^{a} is optionally substituted —(CH₂)ₙ— wherein n is 1, 2, 3, 4, 5, or 6.
[1577] 395. The agent of any one of Embodiments 384-394, wherein L^{a} is —(CH₂)ₙ— wherein n is 1, 2, 3, 4, 5, or 6.
[1578] 396. The agent of any one of Embodiments 384-395, wherein L^{a2} is a covalent bond.
[1579] 397. The agent of any one of Embodiments 384-396, wherein R^{SP1} is optionally substituted —CH═CH₂.
[1580] 398. The agent of any one of Embodiments 384-396, wherein R^{SP1} is —CH═CH₂.
[1581] 399. The agent of any one of the preceding Embodiments, wherein X⁴ is a residue of an amino acid that comprises two olefins each independently suitable for stapling.
[1582] 400. The agent of any one of the preceding Embodiments, wherein X⁴ is —N(R^{a1} L^{a1}-C(-L^{a}-R^{SP1})(R^{a3})-L^{a2}-C(O)—
[1583] 401. The agent of Embodiment 400, wherein R^{a1} is —H.
[1584] 402. The agent of any one of Embodiments 400-401, wherein R^{a3} is —H.
[1585] 403. The agent of any one of Embodiments 400-401, wherein R^{a3} is optionally substituted C₁−6 aliphatic.
[1586] 404. The agent of any one of the preceding Embodiments, wherein X⁴ is —N(R^{a1})-L^{a1}-C(-L^{a}-R^{SP1})(-L^{a}-R^{SP2})-L^{a2}-C(O)—.
[1587] 405. The agent of any one of Embodiments 400-404, wherein L^{a1} is a covalent bond.
[1588] 406. The agent of any one of Embodiments 400-405, wherein L^{a} is a covalent bond or an optionally substituted bivalent C₁₋₁₀ aliphatic wherein one or more methylene units are optionally and independently replaced with —O—, —S—, -Cy-, —N(R′)—, —C(O)—, —C(O)N(R′)—, or —N(R′)C(O)O—.
[1589] 407. The agent of any one of Embodiments 400-405, wherein L^{a} is an optionally substituted bivalent C₁₋₁₀ aliphatic wherein one or more methylene units are optionally and independently replaced with —O—, —S—, -Cy-, —N(R′)—, —C(O)—, —C(O)N(R′)—, or —N(R′)C(O)O—.
[1590] 408. The agent of any one of Embodiments 400-405, wherein L^{a} is a bivalent C₁₋₆ aliphatic wherein one or more methylene units are optionally and independently replaced with —O—, —S—, —N(R′)—, —C(O)—, —C(O)N(R′)—, or —N(R′)C(O)O—.
[1591] 409. The agent of any one of Embodiments 400-406, wherein L^{a} bonded to R^{SP1} is optionally substituted —(CH₂)ₙ— wherein n is 1, 2, 3, 4, 5, or 6.
[1592] 410. The agent of any one of Embodiments 400-406, wherein L^{a} bonded to R^{SP1} is —(CH₂)ₙ— wherein n is 1, 2, 3, 4, 5, or 6.
[1593] 411. The agent of any one of Embodiments 400-410, wherein L^{a2} is a covalent bond.
[1594] 412. The agent of any one of Embodiments 400-411, wherein R^{SP1} is optionally substituted —CH═CH₂.
[1595] 413. The agent of any one of Embodiments 400-411, wherein R^{SP1} is —CH═CH₂.
[1596] 414. The agent of any one of Embodiments 400-413, wherein R^{SP2} is optionally substituted —CH═CH₂.
[1597] 415. The agent of any one of Embodiments 400-413, wherein R^{SP2} is —CH═CH₂.
[1598] 416. The agent of any one of Embodiments 400-415, wherein L^{a} bonded to R^{SP1} is a covalent bond or an optionally substituted bivalent C₁₋₁₀ aliphatic wherein one or more methylene units are optionally and independently replaced with —O—, —S—, -Cy-, —N(R′)—, —C(O)—, —C(O)N(R′)—, or —N(R′)C(O)O—.
[1599] 417. The agent of any one of Embodiments 400-415, wherein L^{a} bonded to R^{SP1} is an optionally substituted bivalent C₁₋₁₀ aliphatic wherein one or more methylene units are optionally and independently replaced with —O—, —S—, -Cy-, —N(R′)—, —C(O)—, —C(O)N(R′)—, or —N(R′)C(O)O—.
[1600] 418. The agent of any one of Embodiments 400-415, wherein L^{a} bonded to R^{SP1} is a bivalent C₁₋₆ aliphatic wherein one or more methylene units are optionally and independently replaced with —O—, —S—, —N(R′)—, —C(O)—, —C(O)N(R′)—, or —N(R′)C(O)O—.
[1601] 419. The agent of any one of Embodiments 400-415, wherein L^{a} bonded to R^{SP1} is optionally substituted —(CH₂)ₙ— wherein n is 1, 2, 3, 4, 5, or 6.
[1602] 420. The agent of any one of Embodiments 400-415, wherein L^{a} bonded to R^{SP1} is —(CH₂)ₙ— wherein n is 1, 2, 3, 4, 5, or 6.
[1603] 421. The agent of any one of Embodiments 404-420, wherein L^{a} bonded to R^{SP2} is a covalent bond or an optionally substituted bivalent C₁₋₁₀ aliphatic wherein one or more methylene units are optionally and independently replaced with —O—, —S—, -Cy-, —N(R′)—, —C(O)—, —C(O)N(R′)—, or —N(R′)C(O)O—.
[1604] 422. The agent of any one of Embodiments 404-420, wherein L^{a} bonded to R^{SP2} is an optionally substituted bivalent C₁₋₁₀ aliphatic wherein one or more methylene units are optionally and independently replaced with —O—, —S—, -Cy-, —N(R′)—, —C(O)—, —C(O)N(R′)—, or —N(R′)C(O)O—.
[1605] 423. The agent of any one of Embodiments 404-420, wherein L^{a} bonded to R^{SP2} is a bivalent C₁₋₆ aliphatic wherein one or more methylene units are optionally and independently replaced with —O—, —S—, —N(R′)—, —C(O)—, —C(O)N(R′)—, or —N(R′)C(O)O—.
[1606] 424. The agent of any one of Embodiments 404-420, wherein L^{a} bonded to R^{SP2} is optionally substituted —(CH₂)ₙ— wherein n is 1, 2, 3, 4, 5, or 6.
[1607] 425. The agent of any one of Embodiments 404-420, wherein L^{a} bonded to R^{SP2} is —(CH₂)ₙ— wherein n is 1, 2, 3, 4, 5, or 6.
[1608] 426. The agent of any one of the preceding Embodiments, wherein X⁴ is a residue of an amino acid having the structure of formula A-I, A-II or A-III, wherein R^{a2} and R^{a3} independently comprises an olefin.
[1609] 427. The agent of any one of the preceding Embodiments, wherein X⁴ is a residue of an amino acid having the structure of formula A-I, A-II or A-III, wherein R^{a2} and R^{a3} are independently -L^{a}-CH═CH₂.
[1610] 428. The agent of any one of the preceding Embodiments, wherein X⁴ is B5.
[1611] 429. The agent of any one of the preceding Embodiments, wherein X¹¹ is an amino acid residue suitable for stapling.
[1612] 430. The agent of any one of the preceding Embodiments, wherein X¹¹ is —N(R^{a1})-L^{a1}-C(-L^{a}-R^{SP1})(R^{a3})-L^{a2}-C(O)—.
[1613] 431. The agent of Embodiment 430, wherein R^{a1} is —H.
[1614] 432. The agent of any one of Embodiments 430-431, wherein L^{a1} is a covalent bond.
[1615] 433. The agent of any one of Embodiments 430-432, wherein L^{a} is a covalent bond or an optionally substituted bivalent C₁₋₁₀ aliphatic wherein one or more methylene units are optionally and independently replaced with —O—, —S—, -Cy-, —N(R′)—, —C(O)—, —C(O)N(R′)—, or —N(R′)C(O)O—.
[1616] 434. The agent of any one of Embodiments 430-432, wherein L^{a} is an optionally substituted bivalent C₁₋₁₀ aliphatic wherein one or more methylene units are optionally and independently replaced with —O—, —S—, -Cy-, —N(R′)—, —C(O)—, —C(O)N(R′)—, or —N(R′)C(O)O—.
[1617] 435. The agent of any one of Embodiments 430-432, wherein L^{a} is a bivalent C₁₋₆ aliphatic wherein one or more methylene units are optionally and independently replaced with —O—, —S—, —N(R′)—, —C(O)—, —C(O)N(R′)—, or —N(R′)C(O)O—.
[1618] 436. The agent of any one of Embodiments 430-433, wherein L^{a} is —(CH₂)ₙ— wherein n is 1, 2, 3, 4, 5, or 6.
[1619] 437. The agent of any one of Embodiments 430-436, wherein L^{a2} is a covalent bond.
[1620] 438. The agent of any one of Embodiments 430-437, wherein R^{SP1} is optionally substituted —CH═CH₂.
[1621] 439. The agent of any one of Embodiments 430-437, wherein R^{SP1} is —CH═CH₂.
[1622] 440. The agent of any one of Embodiments 430-439, wherein one methylene unit of L is replaced with —N(R′)—.
[1623] 441. The agent of any one of Embodiments 430-439, wherein one methylene unit of L is replaced with —N(R′)C(O)O—.
[1624] 442. The agent of any one of Embodiments 440-441, wherein R′ is —H.
[1625] 443. The agent of any one of Embodiments 440-441, wherein R′ is C₁₋₆ aliphatic.
[1626] 444. The agent of any one of Embodiments 440-441, wherein R′ and R^{a3} are taken together with their intervening atom(s) to form an optionally substituted 3-14 membered ring having 0-5 heteroatoms in addition to the nitrogen atom to which R′ is attached.
[1627] 445. The agent of any one of Embodiments 440-441, wherein R′ and R^{a3} are taken together with their intervening atom(s) to form an optionally substituted 3-8 membered ring having 0-5 heteroatoms in addition to the nitrogen atom to which R′ is attached.
[1628] 446. The agent of any one of Embodiments 440-441, wherein R′ and R^{a3} are taken together with their intervening atom(s) to form an optionally substituted 3-7 membered ring having no heteroatoms in addition to the nitrogen atom to which R′ is attached.
[1629] 447. The agent of any one of Embodiments 444-446, wherein the ring is monocyclic.
[1630] 448. The agent of any one of Embodiments 444-447, wherein the ring is saturated.
[1631] 449. The agent of any one of Embodiments 444-448, wherein the ring is 5-membered.
[1632] 450. The agent of any one of Embodiments 430-443, wherein R^{a3} is —H.
[1633] 451. The agent of any one of Embodiments 430-443, wherein R^{a3} is optionally substituted C₁₋₆ aliphatic.
[1634] 452. The agent of any one of Embodiments 430-439 and 450-451, wherein L^{a} is optionally substituted —(CH₂)ₙ— wherein n is 1, 2, 3, 4, 5, or 6.
[1635] 453. The agent of Embodiment 452, wherein L^{a} is —(CH₂)ₙ— wherein n is 1, 2, 3, 4, 5, or 6.
[1636] 454. The agent of any one of the preceding Embodiments, wherein X¹¹ is PyrS2, S8, PyrS, S7, PyrS3, SeN, Az, S4, S6, SdN, S10, S5, SgN or PyrS1.
[1637] 455. The agent of Embodiment 450, wherein X¹¹ is PyrS2.
[1638] 456. The agent of Embodiment 450, wherein X¹¹ is S8.
[1639] 457. The agent of Embodiment 450, wherein X¹¹ is PyrS3.
[1640] 458. The agent of any one of the preceding Embodiments, wherein X¹ is selected from PL3, Phe, Ala, Aib, Pro, alphaMePro or Asp.
[1641] 459. The agent of any one of the preceding Embodiments, wherein X¹ is selected from Bn3OAllyl, BzAm3Oallyl, HypBzEs3OAllyl, HypEs4, HypEs5, HypPAc3OAllyl, MePro, NMebAla, PAc3OAllyl, ProAm5, ProAm6, ProBzAm3OAllyl, ProPAc3OAllyl, ProSAm3, PyrR, Sar, Aib, Ala, Asp, Gly, Phe, PL3, Pro, R3, and R5.
[1642] 460. The agent of any one of the preceding Embodiments, wherein X¹ is selected from Bn3OAllyl, BzAm3Oallyl, HypBzEs3OAllyl, HypEs4, HypEs5, HypPAc3OAllyl, MePro, NMebAla, PAc3OAllyl, ProAm5, ProAm6, ProBzAm3OAllyl, ProPAc3OAllyl, ProSAm3, PyrR, and Sar.
[1643] 461. The agent of any one of the preceding Embodiments, wherein X¹ is selected from Aib, Ala, Asp, Gly, Phe, PL3, Pro, R3, and R5.
[1644] 462. The agent of any one of the preceding Embodiments, wherein X² is selected from Asp, RbGlu, Phe, Asn, Ile, Glu, NMeD, His, Ala, tetz, isoDAsp, Ser, Gln, Leu, Hse, Dab, Tyr, 3MeF, 3FF, [MeSO2]Dap, [Tf]Dap and SbGlu.
[1645] 463. The agent of any one of the preceding Embodiments, wherein X² is selected from Asp, Hse, Asn, Glu, RbGlu, SbGlu, and isoDAsp.
[1646] 464. The agent of any one of the preceding Embodiments, wherein X² is selected from [CH2CMe2CO2H]TriAzDap, [CMe2CO2H]TriAzDap, [Et]AspE, [EtSSEt]AspE, [EtSSHex]AspE, [EtSSPh]AspE, [EtSSpy]AspE, [Me]AspE, AcAsp, AspSH, RbOHAsp, [MeSO2]Dap, [Tf]Dap,
[1647] 2COOHF, 3COOHF, 3FF, 3MeF, 4Thz, 4Tria, Aad, Ala, Asn, Asp, Dab, Gln, Glu, His, Hse, Ile, isoDAsp, Leu, NMeD, Phe, PL3, R3, R5, RbGlu, SbGlu, Ser, tetz, TfeGA, Thr, and Tyr.
[1648] 465. The agent of any one of the preceding Embodiments, wherein X² is selected from [CH₂CMe2CO2H]TriAzDap, [CMe2CO2H]TriAzDap, [Et]AspE, [EtSSEt]AspE, [EtSSHex]AspE, [EtSSPh]AspE, [EtSSpy]AspE, [Me]AspE, AcAsp, AspSH, and RbOHAsp.
[1649] 466. The agent of any one of the preceding Embodiments, wherein X² is selected from [MeSO2]Dap, [Tf]Dap, 2COOHF, 3COOHF, 3FF, 3MeF, 4Thz, 4Tria, Aad, Ala, Asn, Asp, Dab, Gln, Glu, His, Hse, Ile, isoDAsp, Leu, NMeD, Phe, PL3, R3, R5, RbGlu, SbGlu, Ser, tetz, TfeGA, Thr, and Tyr.
[1650] 467. The agent of any one of the preceding Embodiments, wherein X² comprises a side chain comprising an acid group.
[1651] 468. The agent of any one of the preceding Embodiments, wherein X² comprises a side chain comprising —COOH or a salt form thereof.
[1652] 469. The agent of any one of the preceding Embodiments, wherein X² is —N(R^{a1})-L^{a1}-C(R^{a2})(R^{a3})-L^{a2}-C(O)—.
[1653] 470. The agent of Embodiment 469, wherein R^{a1} is —H.
[1654] 471. The agent of any one of Embodiments 469-470, wherein R^{a3} is —H.
[1655] 472. The agent of any one of Embodiments 469-470, wherein R^{a3} is optionally substituted C₁₋₆ aliphatic.
[1656] 473. The agent of any one of Embodiments 469-472, wherein L^{a1} is a covalent bond
[1657] 474. The agent of any one of Embodiments 469-473, wherein L^{a2} is a covalent bond.
[1658] 475. The agent of any one of Embodiments 469-474, wherein R^{a2} is or comprises an acidic or polar group.
[1659] 476. The agent of any one of Embodiments 469-475, wherein R^{a2} is -L″—COOH.
[1660] 477. The agent of any one of Embodiments 469-475, wherein R^{a2} is -L″-Cy-COOH.
[1661] 478. The agent of Embodiment 477, wherein -Cy- is optionally substituted phenylene.
[1662] 479. The agent of any one of Embodiments 469-475, wherein R^{a2} is -L″—C(O)N(R′)₂.
[1663] 480. The agent of any one of Embodiments 476-479, wherein L″ is a covalent bond or an optionally substituted bivalent C₁₋₁₀ aliphatic wherein one or more methylene units are optionally and independently replaced with —O—, —S—, -Cy-, —N(R′)—, —C(O)—, —C(O)N(R′)—, or —N(R′)C(O)O—.
[1664] 481. The agent of any one of Embodiments 476-479, wherein L″ is an optionally substituted bivalent C₁₋₁₀ aliphatic wherein one or more methylene units are optionally and independently replaced with —O—, —S—, -Cy-, —N(R′)—, —C(O)—, —C(O)N(R′)—, or —N(R′)C(O)O—.
[1665] 482. The agent of any one of Embodiments 476-479, wherein L″ is a bivalent C₁₋₆ aliphatic wherein one or more methylene units are optionally and independently replaced with —O—, —S—, —N(R′)—, —C(O)—, —C(O)N(R′)—, or —N(R′)C(O)O—.
[1666] 483. The agent of any one of Embodiments 476-480, wherein L″ is optionally substituted —(CH₂)ₙ— wherein n is 1, 2, 3, 4, 5, or 6.
[1667] 484. The agent of any one of Embodiments 476-483, wherein L″ is —(CH₂)ₙ— wherein n is 1, 2, 3, 4, 5, or 6.
[1668] 485. The agent of any one of the preceding Embodiments, wherein X² is Asp.
[1669] 486. The agent of any one of Embodiments 1-462, wherein X² comprises a side chain comprising a polar group.
[1670] 487. The agent of any one of Embodiments 1-462, wherein X² comprises a side chain comprising —OH.
[1671] 488. The agent of any one of Embodiments 1-462, wherein X² comprises a side chain comprising an amide group.
[1672] 489. The agent of any one of the preceding Embodiments, wherein X³ is —N(R^{a1})-L^{a1}-C(-L^{a}-R^{SP1})(R^{a3})-L^{a2}-C(O)—.
[1673] 490. The agent of Embodiment 489, wherein R^{a1} is —H.
[1674] 491. The agent of any one of Embodiments 489-490, wherein R^{a3} is —H.
[1675] 492. The agent of any one of Embodiments 489-490, wherein R^{a3} is optionally substituted C₁−6 aliphatic.
[1676] 493. The agent of any one of Embodiments 489-492, wherein L^{a1} is a covalent bond.
[1677] 494. The agent of any one of Embodiments 489-493, wherein L^{a} is a covalent bond or an optionally substituted bivalent C₁₋₁₀ aliphatic wherein one or more methylene units are optionally and independently replaced with —O—, —S—, -Cy-, —N(R′)—, —C(O)—, —C(O)N(R′)—, or —N(R′)C(O)O—.
[1678] 495. The agent of any one of Embodiments 489-493, wherein L^{a} is an optionally substituted bivalent C₁₋₁₀ aliphatic wherein one or more methylene units are optionally and independently replaced with —O—, —S—, -Cy-, —N(R′)—, —C(O)—, —C(O)N(R′)—, or —N(R′)C(O)O—.
[1679] 496. The agent of any one of Embodiments 489-493, wherein L^{a} is a bivalent C₁₋₆ aliphatic wherein one or more methylene units are optionally and independently replaced with —O—, —S—, —N(R′)—, —C(O)—, —C(O)N(R′)—, or —N(R′)C(O)O—.
[1680] 497. The agent of any one of Embodiments 489-494, wherein L^{a} is optionally substituted —(CH₂)ₙ— wherein n is 1, 2, 3, 4, 5, or 6.
[1681] 498. The agent of any one of Embodiments 489-494, wherein L^{a} is —(CH₂)ₙ— wherein n is 1, 2, 3, 4, 5, or 6.
[1682] 499. The agent of any one of Embodiments 489-498, wherein L^{a2} is a covalent bond.
[1683] 500. The agent of any one of Embodiments 489-499, wherein R^{SP1} is optionally substituted —CH═CH₂.
[1684] 501. The agent of any one of Embodiments 489-499, wherein R^{SP1} is —CH═CH₂.
[1685] 502. The agent of any one of the preceding Embodiments, wherein X³ is selected from Npg, Ala, Ile, Leu, Cha, Phe, Abu, hLeu, RdN, 1NapA, 2NapA, R8, Val, F3CA, [AzAc]Lys, Gln, aIle, Nva, TOMe, hSe, S(Ome), nLeu, Thr, Asn, Ser, and HF2CA.
[1686] 503. The agent of any one of the preceding Embodiments, wherein X³ comprises a hydrophobic side chain.
[1687] 504. The agent of any one of the preceding Embodiments, wherein X³ is —N(R^{a1})-L^{a1}-C(R^{a2})(R^{a3})-L^{a2}-C(O)—.
[1688] 505. The agent of Embodiment 504, wherein X³ is —N(R^{a1})—C(R^{a2})(R^{a3})—C(O)—.
[1689] 506. The agent of Embodiment 504, wherein X³ is —NH—C(R^{a2})(R^{a3})—C(O)—.
[1690] 507. The agent of any one of Embodiments 504-506, wherein R^{a2} and R^{a3} are independently hydrogen or optionally substituted C₁₋₁₀ aliphatic.
[1691] 508. The agent of any one of Embodiments 504-506, wherein one of R^{a2} and R^{a3} is hydrogen and the other is C₁₋₁₀ aliphatic.
[1692] 509. The agent of any one of Embodiments 504-506, wherein R^{a2} and R^{a3} are taken together with the carbon atom to which they are attached to form an optionally substituted 3-8 membered ring having 1-3 heteroatoms.
[1693] 510. The agent of any one of Embodiments 504-506, wherein R^{a2} and R^{a3} are taken together with the carbon atom to which they are attached to form 3-8 membered cycloalkyl.
[1694] 511. The agent of any one of the preceding Embodiments, wherein the side chain of X³ is C₁₋₁₀ alkyl optionally substituted with one or more substituents independently selected from halogen, —SR and —OR, wherein each R is independently C₁₋₄ alkyl.
[1695] 512. The agent of any one of the preceding Embodiments, wherein the side chain of X³ is C₁₋₁₀ alkyl.
[1696] 513. The agent of any one of the preceding Embodiments, wherein X³ is not stapled.
[1697] 514. The agent of any one of the preceding Embodiments, wherein X³ is Npg.
[1698] 515. The agent of any one of Embodiments 1-502, wherein X³ is an amino acid residue suitable for stapling.
[1699] 516. The agent of any one of Embodiments 1-502, wherein X³ is stapled with X¹⁰.
[1700] 517. The agent of Embodiment 516, wherein the X³—X¹⁰ staple is the only staple in the peptide.
[1701] 518. The agent of any one of Embodiments 515-517, wherein X³ is RdN or R8.
[1702] 519. The agent of any one of the preceding Embodiments, wherein X³ is selected from [lithocholate]-Lys, [lithocholate-PEG2]-Lys, [Me3AdamantC]-Lys, [Me3AdamantC-PEG2]-Lys, Npa, 1NapA, 2NapA, Abu, aIle, Ala, Asn, Asp, B5, Cha, F3CA, Gln, Glu, HF2CA, hLeu, hSe, Ile, iPrLys, Leu, Lys, nLeu, Npg, Nva, Phe, R8, RdN, S(Ome), Ser, TfeGA, Thr, TOMe, Trp, Tyr, and Val.
[1703] 520. The agent of any one of the preceding Embodiments, wherein X³ is selected from [lithocholate]-Lys, [lithocholate-PEG2]-Lys, [Me3AdamantC]-Lys, [Me3AdamantC-PEG2]-Lys, and Npa.
[1704] 521. The agent of any one of the preceding Embodiments, wherein X³ is selected from 1NapA, 2NapA, Abu, aIle, Ala, Asn, Asp, B5, Cha, F3CA, Gln, Glu, HF2CA, hLeu, hSe, Ile, iPrLys, Leu, Lys, nLeu, Npg, Nva, Phe, R8, RdN, S(Ome), Ser, TfeGA, Thr, TOMe, Trp, Tyr, and Val.
[1705] 522. The agent of any one of the preceding Embodiments, wherein X⁴ is selected from B5, R8, RdN, R5, Ala, RgN, ReN, R7, Az, Asp, R6, and R4.
[1706] 523. The agent of any one of the preceding Embodiments, wherein X⁴ and X¹¹ are stapled.
[1707] 524. The agent of Embodiment 523, wherein the X⁴—X¹ staple is the only staple in the peptide.
[1708] 525. The agent of Embodiment 523 or 524, wherein X⁴ is selected from R8, RdN, R5, RgN, ReN, R7, Az, R6, and R4.
[1709] 526. The agent of any one of the preceding Embodiments, wherein X⁴ is selected from B3, B4, B6, Aib, Ala, Asp, Az, B5, Npg, R3, R4, R5, R6, R7, R8, RdN, ReN, RgN, S3, S4, S5, and S6.
[1710] 527. The agent of any one of the preceding Embodiments, wherein X⁴ is selected from B3, B4, and B6.
[1711] 528. The agent of any one of the preceding Embodiments, wherein X⁴ is selected from Aib, Ala, Asp, Az, B5, Npg, R3, R4, R5, R6, R7, R8, RdN, ReN, RgN, S3, S4, S5, and S6.
[1712] 529. The agent of any one of Embodiments 1-522, wherein X⁴ is not stapled.
[1713] 530. The agent of Embodiment 529, wherein X⁴ is Ala or Asp.
[1714] 531. The agent of any one of the preceding Embodiments, wherein X⁵ is selected from Asp, Hse, Asn, Glu, tetz, 3Thi, hPhe, 2pyrA, Ala, [MeSO2]Dap, [Tf]Dap, Ser, Gln, Leu, Dab, [MeSO2]Dab, nLeu, His,
[1715] 3pyrA, 4pyrA, [NHiPr]AsnR, [NHEt]AsnR, [NHnPr]AsnR, [NHCyPr]AsnR, [NHCyBu]AsnR, [NHMe]AsnR, Phe, isoAsp, isoDAsp, RbGlu, and SbGlu.
[1716] 532. The agent of any one of the preceding Embodiments, wherein X⁵ is selected from [Et]AspE, [EtSSEt]AspE, [EtSSHex]AspE, [EtSSPh]AspE, [EtSSpy]AspE, [Me]AspE, AspSH, bMe2Asp, [MeSO2]Dab, [MeSO2]Dap, [NHCyBu]AsnR, [NHCyPr]AsnR, [NHEt]AsnR, [NHiPr]AsnR, [NHMe]AsnR, [NHnPr]AsnR, [Tf]Dap, 2pyrA, 3pyrA, 3Thi, 4pyrA, Ala, Arg, Asn, Asp, B5, BztA, Dab, Gln, Glu, His, hPhe, Hse, isoAsp, isoDAsp, Leu, nLeu, Npg, RbGlu, SbGlu, Ser, tetz, and Thr.
[1717] 533. The agent of any one of the preceding Embodiments, wherein X⁵ is selected from [Et]AspE, [EtSSEt]AspE, [EtSSHex]AspE, [EtSSPh]AspE, [EtSSpy]AspE, [Me]AspE, AspSH, and bMe2Asp.
[1718] 534. The agent of any one of the preceding Embodiments, wherein X⁵ is selected from [MeSO2]Dab, [MeSO2]Dap, [NHCyBu]AsnR, [NHCyPr]AsnR, [NHEt]AsnR, [NHiPr]AsnR, [NHMe]AsnR, [NHnPr]AsnR, [Tf]Dap, 2pyrA, 3pyrA, 3Thi, 4pyrA, Ala, Arg, Asn, Asp, B5, BztA, Dab, Gln, Glu, His, hPhe, Hse, isoAsp, isoDAsp, Leu, nLeu, Npg, RbGlu, SbGlu, Ser, tetz, and Thr.
[1719] 535. The agent of any one of the preceding Embodiments, wherein X⁵ is selected from Asp, Asn, Gln, Glu, Hse, and Ser.
[1720] 536. The agent of any one of the preceding Embodiments, wherein X⁵ comprises a side chain comprising an acid group.
[1721] 537. The agent of any one of the preceding Embodiments, wherein X⁵ is —N(R^{a1})-L^{a1}-C(R^{a2})(R^{a3})-L^{a2}-C(O)—.
[1722] 538. The agent of Embodiment 537, wherein R^{a1} is —H.
[1723] 539. The agent of any one of Embodiments 537-538, wherein R^{a3} is —H.
[1724] 540. The agent of any one of Embodiments 537-538, wherein R^{a3} is optionally substituted C₁₋₆ aliphatic.
[1725] 541. The agent of any one of Embodiments 537-540, wherein L^{a1} is a covalent bond.
[1726] 542. The agent of any one of Embodiments 537-541, wherein L^{a2} is a covalent bond.
[1727] 543. The agent of any one of Embodiments 537-542, wherein R^{a2} is or comprises an acidic or polar group.
[1728] 544. The agent of any one of Embodiments 537-543, wherein R^{a2} is -L″—COOH.
[1729] 545. The agent of any one of Embodiments 537-543, wherein R^{a2} is -L″-Cy-COOH.
[1730] 546. The agent of Embodiment 545, wherein -Cy- is optionally substituted phenylene.
[1731] 547. The agent of any one of Embodiments 537-543, wherein R^{a2} is -L″—C(O)N(R′)₂.
[1732] 548. The agent of any one of Embodiments 544-547, wherein L″ is a covalent bond or an optionally substituted bivalent C₁₋₁₀ aliphatic wherein one or more methylene units are optionally and independently replaced with —O—, —S—, -Cy-, —N(R′)—, —C(O)—, —C(O)N(R′)—, or —N(R′)C(O)O—.
[1733] 549. The agent of any one of Embodiments 544-547, wherein L″ is an optionally substituted bivalent C₁₋₁₀ aliphatic wherein one or more methylene units are optionally and independently replaced with —O—, —S—, -Cy-, —N(R′)—, —C(O)—, —C(O)N(R′)—, or —N(R′)C(O)O—.
[1734] 550. The agent of any one of Embodiments 544-547, wherein L″ is a bivalent C₁₋₆ aliphatic wherein one or more methylene units are optionally and independently replaced with —O—, —S—, —N(R′)—, —C(O)—, —C(O)N(R′)—, or —N(R′)C(O)O—.
[1735] 551. The agent of any one of Embodiments 544-548, wherein L″ is optionally substituted —(CH₂)ₙ— wherein n is 1, 2, 3, 4, 5, or 6.
[1736] 552. The agent of any one of Embodiments 544-550, wherein L″ is —(CH₂)ₙ— wherein n is 1, 2, 3, 4, 5, or 6.
[1737] 553. The agent of any one of the preceding Embodiments, wherein X⁵ comprises a side chain comprising —COOH or a salt form thereof.
[1738] 554. The agent of any one of the preceding Embodiments, wherein X⁵ is Asp.
[1739] 555. The agent of any one of Embodiments 1-531, wherein X⁵ comprises a side chain comprising a polar group.
[1740] 556. The agent of any one of Embodiments 1-531, wherein X⁵ comprises a side chain comprising —OH.
[1741] 557. The agent of any one of Embodiments 1-531, wherein X⁵ comprises a side chain comprising an amide group.
[1742] 558. The agent of any one of the preceding Embodiments, wherein X⁶ is selected from Asp, Glu, TfeGA, Thr, EtGA, Asn, 3COOHF, HIs, Gln, 2NapA, 4COOHF, nLeu, Leu, Cit, Aad, Cha, hLeu, hPhe, Ala, 3PyrA, Bip, Tyr, aMeDF, Phe, 1NapA, DaMeL, 3F3MeF, 4F3MeF, tetz, Arg, 2COOHF, DGlu, BztA, Trp, 6F1NapA, 3FF, 4FF, 34FF, 2PyrA, 4PyrA, hTyr, Qui, DipA, 4AmPhe, 2Thi, 1meH, [iPr]GA, [Pfbn]GA, [Tfb]GA, [Bn]GA, Lys, [Tfp]Dap, 1AcAW, Ser, Val, and [MeSO2]Dap.
[1743] 559. The agent of any one of the preceding Embodiments, wherein X⁶ is selected from [2COOH4NH2Ph]Dap, [2COOH4NO2Ph]Cys, [2COOH4NO2Ph]Dap, [2COOHPh]TriAzDab, [2COOHPh]TriAzDap, [2Nic]Dap, [3COOH4NO2Ph]Dap, [4AcMePip]GA, [4AcMePip]GAbu, [4CF3PhAc]GA, [4CF3PhAc]GAbu, [Ac]GA, [Ac]GAbu, [Bn]GAbu, [CCpCO2H]TriAzDap, [CF3CO]GA, [CH₂CChCO2H]TriAzDap, [CH₂CCpCO2H]TriAzDap, [CH₂CH₂CO2H]TriAzDab, [CH₂CH₂CO2H]TriAzDap, [CH₂CMe2CO2H]TriAzDab, [CH₂CMe2CO2H]TriAzDap, [CH₂CO2H]GAbu, [CH₂CO2H]TriAzDab, [CH₂CO2H]TriAzDap, [CMe2CO2H]TriAzDab, [CMe2CO2H]TriAzDap, [Et]AspE, [Et]GA, [Et]GAbu, [Et]GluE, [EtSSEt]AspE, [EtSSEt]GluE, [EtSSHex]AspE, [EtSSPh]AspE, [EtSSPh]GluE, [EtSSpy]GluE, [Me]AspE, [Me]GA, [Me]GluE, [MeMorphBz]GA, [MeMorphBz]GAbu, [MePipAc]GA, [MePipAc]GAbu, [MorphAc]GA, [MorphAc]GAbu, [MorphEt]GAbu, [NdiMeButC]GA, [NdiMeButC]GAbu, [Pfb]GA, [Pfbn]GAbu, [PfBz]GA, [PfBz]GAbu, [PfPhAc]GA, [PfPhAc]GAbu, [Pic]GA, [Pic]GAbu, [sBu]GA, [Tfb]GAbu, [Tfp]GA, [Tfp]GAbu, 3TzF, 4F3COOHF, 4TzF, 5F3Me3COOHF, 5iPr3COOHF, AspSH, GAbu, GluSH, R2COOPipA, R3COOPipA, S2COOPipA, S3COOPipA, [Bn]GA, [iPr]GA, [Me2NPr]GA, [Me2NPr]GAbu, [MeSO2]Dap, [Pfbn]GA, [Tfb]GA, [Tfp]Dap, 1AcAW, 1meH, 1NapA, 2COOHF, 2NapA, 2PyrA, 2Thi, 34FF, 3cbmf, 3COOHF, 3F3MeF, 3FF, 3PyrA, 3thi, 4AmPhe, 4COOHF, 4F3MeF, 4FF, 4PyrA, 6F1NapA, Aad, Ala, aMeDF, Arg, Asn, Asp, B5, Bip, BztA, Cha, Cit, DaMeL, DGlu, DipA, EtGA, GA, Gln, Glu, His, hLeu, hPhe, Hse, hTyr, Leu, Lys, nLeu, Npg, Pff, Phe, Qui, Ser, tetz, TfeGA, Thr, Trp, Tyr, and Val.
[1744] 560. The agent of any one of the preceding Embodiments, wherein X⁶ is selected from [2COOH4NH2Ph]Dap, [2COOH4NO2Ph]Cys, [2COOH4NO2Ph]Dap, [2COOHPh]TriAzDab, [2COOHPh]TriAzDap, [2Nic]Dap, [3COOH4NO2Ph]Dap, [4AcMePip]GA, [4AcMePip]GAbu, [4CF3PhAc]GA, [4CF3PhAc]GAbu, [Ac]GA, [Ac]GAbu, [Bn]GAbu, [CCpCO2H]TriAzDap, [CF3CO]GA, [CH₂CChCO2H]TriAzDap, [CH₂CCpCO2H]TriAzDap, [CH₂CH₂CO2H]TriAzDab, [CH₂CH₂CO2H]TriAzDap, [CH₂CMe2CO2H]TriAzDab, [CH₂CMe2CO2H]TriAzDap, [CH₂CO2H]GAbu, [CH₂CO2H]TriAzDab, [CH₂CO2H]TriAzDap, [CMe2CO2H]TriAzDab, [CMe2CO2H]TriAzDap, [Et]AspE, [Et]GA, [Et]GAbu, [Et]GluE, [EtSSEt]AspE, [EtSSEt]GluE, [EtSSHex]AspE, [EtSSPh]AspE, [EtSSPh]GluE, [EtSSpy]GluE, [Me]AspE, [Me]GA, [Me]GluE, [MeMorphBz]GA, [MeMorphBz]GAbu, [MePipAc]GA, [MePipAc]GAbu, [MorphAc]GA, [MorphAc]GAbu, [MorphEt]GAbu, [NdiMeButC]GA, [NdiMeButC]GAbu, [Pfb]GA, [Pfbn]GAbu, [PfBz]GA, [PfBz]GAbu, [PfPhAc]GA, [PfPhAc]GAbu, [Pic]GA, [Pic]GAbu, [sBu]GA, [Tfb]GAbu, [Tfp]GA, [Tfp]GAbu, 3TzF, 4F3COOHF, 4TzF, 5F3Me3COOHF, 5iPr3COOHF, AspSH, GAbu, GluSH, R2COOPipA, R3COOPipA, S2COOPipA, and S3COOPipA.
[1745] 561. The agent of any one of the preceding Embodiments, wherein X⁶ is selected from [Bn]GA, [iPr]GA, [Me2NPr]GA, [Me2NPr]GAbu, [MeSO2]Dap, [Pfbn]GA, [Tfb]GA, [Tfp]Dap, 1AcAW, 1meH, 1NapA, 2COOHF, 2NapA, 2PyrA, 2Thi, 34FF, 3cbmf, 3COOHF, 3F3MeF, 3FF, 3PyrA, 3thi, 4AmPhe, 4COOHF, 4F3MeF, 4FF, 4PyrA, 6F1NapA, Aad, Ala, aMeDF, Arg, Asn, Asp, B5, Bip, BztA, Cha, Cit, DaMeL, DGlu, DipA, EtGA, GA, Gln, Glu, His, hLeu, hPhe, Hse, hTyr, Leu, Lys, nLeu, Npg, Pff, Phe, Qui, Ser, tetz, TfeGA, Thr, Trp, Tyr, and Val.
[1746] 562. The agent of any one of the preceding Embodiments, wherein X⁶ comprises a side chain comprising an acid or a polar group.
[1747] 563. The agent of any one of the preceding Embodiments, wherein X⁶ comprises a side chain comprising an acid group.
[1748] 564. The agent of any one of the preceding Embodiments, wherein X⁶ comprises a side chain comprising —COOH or a salt form thereof.
[1749] 565. The agent of any one of the preceding Embodiments, wherein X⁶ is —N(R^{a1})-L^{a1}-C(R^{a2})(R^{a3})-L^{a2}-C(O)—.
[1750] 566. The agent of Embodiment 565, wherein R^{a1} is —H.
[1751] 567. The agent of any one of Embodiments 565-566, wherein R^{a3} is —H.
[1752] 568. The agent of any one of Embodiments 565-566, wherein R^{a3} is optionally substituted C₁₋₆ aliphatic.
[1753] 569. The agent of any one of Embodiments 565-568, wherein L^{a1} is a covalent bond.
[1754] 570. The agent of any one of Embodiments 565-569, wherein L^{a2} is a covalent bond.
[1755] 571. The agent of any one of Embodiments 565-570, wherein R^{a2} is or comprises an acidic or polar group.
[1756] 572. The agent of any one of Embodiments 565-571, wherein R^{a2} is -L″—COOH.
[1757] 573. The agent of any one of Embodiments 565-571, wherein R^{a2} is -L″-Cy-COOH.
[1758] 574. The agent of Embodiment 573, wherein -Cy- is optionally substituted phenylene.
[1759] 575. The agent of any one of Embodiments 565-571, wherein R^{a2} is -L″—C(O)N(R′)₂.
[1760] 576. The agent of any one of Embodiments 572-575, wherein L″ is a covalent bond or an optionally substituted bivalent C₁₋₁₀ aliphatic wherein one or more methylene units are optionally and independently replaced with —O—, —S—, -Cy-, —N(R′)—, —C(O)—, —C(O)N(R′)—, or —N(R′)C(O)O—.
[1761] 577. The agent of any one of Embodiments 572-575, wherein L″ is an optionally substituted bivalent C₁₋₁₀ aliphatic wherein one or more methylene units are optionally and independently replaced with —O—, —S—, -Cy-, —N(R′)—, —C(O)—, —C(O)N(R′)—, or —N(R′)C(O)O—.
[1762] 578. The agent of any one of Embodiments 572-575, wherein L″ is a bivalent C₁₋₆ aliphatic wherein one or more methylene units are optionally and independently replaced with —O—, —S—, —N(R′)—, —C(O)—, —C(O)N(R′)—, or —N(R′)C(O)O—.
[1763] 579. The agent of any one of Embodiments 572-576, wherein L″ is optionally substituted —(CH₂)ₙ— wherein n is 1, 2, 3, 4, 5, or 6.
[1764] 580. The agent of any one of Embodiments 572-579, wherein L″ is —(CH₂)ₙ— wherein n is 1, 2, 3, 4, 5, or 6.
[1765] 581. The agent of any one of Embodiments 572-578, wherein a methylene unit is replaced with —N(R′)—.
[1766] 582. The agent of Embodiment 581, wherein R′ is —H.
[1767] 583. The agent of Embodiment 581, wherein R′ is optionally substituted C₁₋₆ alkyl.
[1768] 584. The agent of any one of the preceding Embodiments, wherein X⁶ is TfeGA.
[1769] 585. The agent of any one of the preceding Embodiments, wherein X⁶ is 3COOHF.
[1770] 586. The agent of any one of the preceding Embodiments, wherein X⁶ is 2COOHF.
[1771] 587. The agent of any one of the preceding Embodiments, wherein X⁶ is Asp.
[1772] 588. The agent of any one of the preceding Embodiments, wherein X⁶ is Aad.
[1773] 589. The agent of any one of Embodiments 1-558, wherein X⁶ comprises a side chain comprising a polar group.
[1774] 590. The agent of any one of Embodiments 1-558, wherein X⁶ comprises a side chain comprising —OH.
[1775] 591. The agent of any one of Embodiments 1-558, wherein X⁶ comprises a side chain comprising an amide group.
[1776] 592. The agent of any one of the preceding Embodiments, wherein X⁷ is a hydrophobic amino acid residue.
[1777] 593. The agent of any one of the preceding Embodiments, wherein X⁷ is —N(R^{a1})-L^{a1}-C(R^{a2})(R^{a3})-L^{a2}-C(O)—.
[1778] 594. The agent of any one of the preceding Embodiments, wherein X⁷ is —N(R^{a1})—C(R^{a2})(R^{a3})—C(O)—.
[1779] 595. The agent of any one of the preceding Embodiments, wherein X⁷ is —NH—C(R^{a2})(R^{a3})—C(O)—.
[1780] 596. The agent of any one of Embodiments 593-595, wherein R^{a2} and R^{a3} are independently hydrogen or optionally substituted C₁₋₁₀ aliphatic.
[1781] 597. The agent of any one of Embodiments 593-595, wherein one of R^{a2} and R^{a3} is hydrogen and the other is C₁₋₁₀ aliphatic.
[1782] 598. The agent of any one of Embodiments 593-595, wherein R^{a2} and R^{a3} are taken together with the carbon atom to which they are attached to form an optionally substituted 3-8 membered ring having 1-3 heteroatoms.
[1783] 599. The agent of any one of Embodiments 593-595, wherein R^{a2} and R^{a3} are taken together with the carbon atom to which they are attached to form 3-8 membered cycloalkyl.
[1784] 600. The agent of any one of the preceding Embodiments, wherein X⁷ is selected from Ala, Leu, iPrLys, Phe, Ser, Aib, Gln, nLeu, Trp, Ile, and Lys, and a substituted or labeled lysine.
[1785] 601. The agent of any one of the preceding Embodiments, wherein X⁷ is selected from Ala, Leu, iPrLys, [AzAc]Lys, Phe, Ser, [FAM6Ppg][p1 TB]Lys, Aib, Gln, nLeu, Trp, [FAM6Ppg][1TriAc]Lys, Ile, and Lys.
[1786] 602. The agent of any one of the preceding Embodiments, wherein X⁷ is selected from Ala, Leu, iPrLys, Phe, Ser, Aib, Gln, nLeu, Trp, Ile, and Lys.
[1787] 603. The agent of any one of the preceding Embodiments, wherein X⁷ is selected from [20xoPpz]GlnR, [3Py]4SF, [4Pippip]GlnR, [Ac]Lys, [AcPpz]GlnR, [bismethoxyethylamine]GlnR, [CF3CO]Lys, [CH₂NMe2]4SEF, [EtSO2Ppz]GlnR, [isoindoline]GlnR, [Me2diaminobutane]GlnR, [Me2Npr]Lys, [Me2NPrPip]GlnR, [MeSO2]Lys, [Morph]GlnR, [NHEt]GlnR, [NMe2]GlnR, [Phc]Lys, [TfePpz]GlnR, Cpg, CyLeu, F2PipNva, hhLeu, Me2Asn, Me2Gln, MeGln, MePpzAsn, Met2O, MorphAsn, MorphNva, [MorphAc]Lys, [mPEG4]Lys, 3COOHF, Aib, Ala, Asn, Asp, Gln, Gly, His, Hse, Ile, iPrLys, Leu, Lys, nLeu, Phe, R5, Ser, Thr, and Trp.
[1788] 604. The agent of any one of the preceding Embodiments, wherein X⁷ is selected from [20xoPpz]GlnR, [3Py]4SF, [4Pippip]GlnR, [Ac]Lys, [AcPpz]GlnR, [bismethoxyethylamine]GlnR, [CF3CO]Lys, [CH₂NMe2]4SEF, [EtSO2Ppz]GlnR, [isoindoline]GlnR, [Me2diaminobutane]GlnR, [Me2Npr]Lys, [Me2NPrPip]GlnR, [MeSO2]Lys, [Morph]GlnR, [NHEt]GlnR, [NMe2]GlnR, [Phc]Lys, [TfePpz]GlnR, Cpg, CyLeu, F2PipNva, hhLeu, Me2Asn, Me2Gln, MeGln, MePpzAsn, Met20, MorphAsn, and MorphNva.
[1789] 605. The agent of any one of the preceding Embodiments, wherein X⁷ is selected from [MorphAc]Lys, [mPEG4]Lys, 3COOHF, Aib, Ala, Asn, Asp, Gln, Gly, His, Hse, Ile, iPrLys, Leu, Lys, nLeu, Phe, R5, Ser, Thr, and Trp.
[1790] 606. The agent of any one of the preceding Embodiments, wherein X⁷ is Ala.
[1791] 607. The agent of any one of the preceding Embodiments, wherein X⁸ is a hydrophobic amino acid residue.
[1792] 608. The agent of any one of the preceding Embodiments, wherein X⁸ is —N(R^{a1})-L^{a1}-C(R^{a2})(R^{a3})-L^{a2}-C(O)—.
[1793] 609. The agent of any one of the preceding Embodiments, wherein X⁸ is —N(R^{a1})—C(R^{a2})(R^{a3})—C(O)—.
[1794] 610. The agent of any one of the preceding Embodiments, wherein X⁸ is —NH—C(R^{a2})(R^{a3})—C(O)—.
[1795] 611. The agent of any one of Embodiments 608−610, wherein R^{a2} and R^{a3} are independently hydrogen or optionally substituted C₁₋₁₀ aliphatic.
[1796] 612. The agent of any one of Embodiments 608−610, wherein one of R^{a2} and R^{a3} is hydrogen and the other is C₁-10 aliphatic.
[1797] 613. The agent of any one of Embodiments 608−610, wherein R^{a2} and R^{a3} are taken together with the carbon atom to which they are attached to form an optionally substituted 3-8 membered ring having 1-3 heteroatoms.
[1798] 614. The agent of any one of Embodiments 608−610, wherein R^{a2} and R^{a3} are taken together with the carbon atom to which they are attached to form 3-8 membered cycloalkyl.
[1799] 615. The agent of any one of the preceding Embodiments, wherein X⁸ is selected from The agent of any one of the preceding Embodiments, wherein X⁸ is selected from Ala, Leu, Phe, Ser, Aib, Asp, Glu, Aad, Trp, nLeu, Gln, Ile, Lys, iPrLys, and a substituted or labeled lysine.
[1800] 616. The agent of any one of the preceding Embodiments, wherein X⁸ is selected from Ala, Leu, Phe, Ser, Aib, Asp, Glu, Aad, Trp, nLeu, [mPEG2]Lys, [AzAc]Lys, Gln, [FAM6Ppg][1TriAc]Lys, [35CF3PhPr]Lys, [1NapPr]Lys, [22PhPr]Lys, [MorphAc]Lys, [MePipAc]Lys, [MeBipipAc]Lys, [4MePipBz]Lys, [MeMorphBz]Lys, [Me2NCBz]Lys, [mPEG4]Lys, [mPEG6]Lys, [mPEG8]Lys, [Bua]Lys, [Oct]Lys, [AdamantC]Lys, [Me3AdamantC]Lys, [AdamantPro]Lys, Ile, Lys, and iPrLys.
[1801] 617. The agent of any one of the preceding Embodiments, wherein X⁸ is Ala.
[1802] 618. The agent of any one of the preceding Embodiments, wherein X⁸ is selected from [lithocholate]-Lys, [lithocholate-PEG2]-Lys, [Me2NCBz]Lys, [Me3AdamantC-PEG2]-Lys, F2PipAbu, F2PipNva, MePpzAbu, MePpzAsn, MePpzNva, MorphAbu, MorphAsn, MorphNva, dAla, [1NapPr]Lys, [22PhPr]Lys, [35CF3PhPr]Lys, [4MePipBz]Lys, [AdamantC]Lys, [AdamantPro]Lys, [Bua]Lys, [Me3AdamantC]Lys, [Me3AdamantC]-Lys, [MeBipipAc]Lys, [MeMorphBz]Lys, [MePipAc]Lys, [MorphAc]Lys, [mPEG2]Lys, [mPEG4]Lys, [mPEG6]Lys, [mPEG8]Lys, [Oct]Lys, 3COOHF, Aad, Aib, Ala, Asp, Gln, Glu, Gly, Ile, iPrLys, Leu, Lys, nLeu, Phe, Ser, and Trp.
[1803] 619. The agent of any one of the preceding Embodiments, wherein X⁸ is selected from [lithocholate]-Lys, [lithocholate-PEG2]-Lys, [Me2NCBz]Lys, [Me3AdamantC-PEG2]-Lys, F2PipAbu, F2PipNva, MePpzAbu, MePpzAsn, MePpzNva, MorphAbu, MorphAsn, MorphNva, and dAla.
[1804] 620. The agent of any one of the preceding Embodiments, wherein X⁸ is selected from [1NapPr]Lys, [22PhPr]Lys, [35CF3PhPr]Lys, [4MePipBz]Lys, [AdamantC]Lys, [AdamantPro]Lys, [Bua]Lys, [Me3AdamantC]Lys, [Me3AdamantC]-Lys, [MeBipipAc]Lys, [MeMorphBz]Lys, [MePipAc]Lys, [MorphAc]Lys, [mPEG2]Lys, [mPEG4]Lys, [mPEG6]Lys, [mPEG8]Lys, [Oct]Lys, 3COOHF, Aad, Aib, Ala, Asp, Gln, Glu, Gly, Ile, iPrLys, Leu, Lys, nLeu, Phe, Ser, and Trp.
[1805] 621. The agent of any one of the preceding Embodiments, wherein X⁹ is selected from Phe, 3F3MeF, 2Thi, 3Thi, 4F3MeF, 30MeF, 3MeF, 2MeF, 2NapA, 345FF, 34FF, 3FF, Asp, Cha, His, 2FurA, 2PyrA, 4AmPhe, 4FF, CypA, Gln, 1meH, 23FF, 2FF, 35FF, 3CBMF, 3ClF, 3meH, 3PyrA, 4CBMF, 4ClF, 4Thz, Ala, BztA, hPhe, hTyr, MeTyr, nLeu, 1NapA, 2CNF, 3CNF, 4CNF, 4MeF, Bip, DipA, npG, and Phg.
[1806] 622. The agent of any one of the preceding Embodiments, wherein X⁹ is selected from [3Py]4SF, [CH₂NMe2]4SEF, [CH₂NMe2]TriAzDap, [CH₂Ppz]TriAzDap, [MorphCH2]TriAzDap, [SO2MorphCH2]TriAzDap, 2NH2F, 3CH₂NMe2F, 3CO2PhF, 3S02F, 4BrF, Cba, 1meH, 1NapA, 23FF, 2cbmf, 2ClF, 2CNF, 2FF, 2FurA, 2MeF, 2NapA, 2PyrA, 2Thi, 345FF, 34FF, 35FF, 3CBMF, 3ClF, 3CNF, 3COOHF, 3F3MeF, 3FF, 3MeF, 3meH, 30MeF, 3PyrA, 3Thi, 4AmPhe, 4CBMF, 4ClF, 4CNF, 4F3MeF, 4FF, 4MeF, 4Thz, Ala, Asp, Bip, BztA, Cha, CypA, DipA, Gln, His, hPhe, hTyr, MeTyr, nLeu, Npg, Phe, Phg, Ser, and Tyr.
[1807] 623. The agent of any one of the preceding Embodiments, wherein X⁹ is selected from [3Py]4SF, [CH₂NMe2]4SEF, [CH₂NMe2]TriAzDap, [CH₂Ppz]TriAzDap, [MorphCH2]TriAzDap, [SO2MorphCH2]TriAzDap, 2NH2F, 3CH₂NMe2F, 3CO2PhF, 3S02F, 4BrF, and Cba.
[1808] 624. The agent of any one of the preceding Embodiments, wherein X⁹ is selected from 1meH, 1NapA, 23FF, 2cbmf, 2ClF, 2CNF, 2FF, 2FurA, 2MeF, 2NapA, 2PyrA, 2Thi, 345FF, 34FF, 35FF, 3CBMF, 3ClF, 3CNF, 3COOHF, 3F3MeF, 3FF, 3MeF, 3meH, 30MeF, 3PyrA, 3Thi, 4AmPhe, 4CBMF, 4ClF, 4CNF, 4F3MeF, 4FF, 4MeF, 4Thz, Ala, Asp, Bip, BztA, Cha, CypA, DipA, Gln, His, hPhe, hTyr, MeTyr, nLeu, Npg, Phe, Phg, Ser, and Tyr.
[1809] 625. The agent of any one of the preceding Embodiments, wherein X⁹ comprises a side chain which is or comprises an optionally substituted aromatic group.
[1810] 626. The agent of any one of the preceding Embodiments, wherein X⁹ is —N(R^{a1})-L^{a1}-C(R^{a2})(R^{a3})-L^{a2}-C(O)—.
[1811] 627. The agent of Embodiment 626, wherein R^{a1} is —H.
[1812] 628. The agent of any one of Embodiments 626−627, wherein R^{a3} is —H.
[1813] 629. The agent of any one of Embodiments 626−627, wherein R^{a3} is optionally substituted C₁₋₆ aliphatic.
[1814] 630. The agent of any one of Embodiments 626−629, wherein L^{a1} is a covalent bond.
[1815] 631. The agent of any one of Embodiments 626−630, wherein R^{a2} is -L^{a}-R, wherein R is or comprises an aromatic group.
[1816] 632. The agent of Embodiment 631, wherein R is optionally substituted 6-10 membered aryl.
[1817] 633. The agent of Embodiment 631, wherein R is optionally substituted phenyl.
[1818] 634. The agent of Embodiment 631, wherein R is phenyl.
[1819] 635. The agent of Embodiment 631, wherein R is optionally substituted naphthyl.
[1820] 636. The agent of Embodiment 631, wherein R is naphthyl.
[1821] 637. The agent of Embodiment 631, wherein R is optionally substituted 5-membered heteroaryl having 1-4 heteroatoms.
[1822] 638. The agent of Embodiment 631, wherein R is optionally substituted 6-membered heteroaryl having 1-4 heteroatoms.
[1823] 639. The agent of Embodiment 631, wherein R is optionally substituted 9-membered bicyclic heteroaryl having 1-4 heteroatoms.
[1824] 640. The agent of Embodiment 631, wherein R is optionally substituted 10-membered bicyclic heteroaryl having 1-4 heteroatoms.
[1825] 641. The agent of any one of Embodiments 637−640, wherein a heteroatom is nitrogen.
[1826] 642. The agent of any one of Embodiments 637−641, wherein a heteroatom is oxygen.
[1827] 643. The agent of any one of Embodiments 637−642, wherein a heteroatom is sulfur.
[1828] 644. The agent of any one of Embodiments 637−640, wherein the heteroaryl has only one heteroatom.
[1829] 645. The agent of Embodiment 644, wherein the heteroatom is nitrogen.
[1830] 646. The agent of Embodiment 644, wherein the heteroatom is oxygen.
[1831] 647. The agent of Embodiment 644, wherein the heteroatom is sulfur.
[1832] 648. The agent of any one of Embodiments 631−647, wherein L^{a} is a covalent bond or an optionally substituted bivalent C₁₋₁₀ aliphatic wherein one or more methylene units are optionally and independently replaced with —O—, —S—, -Cy-, —N(R′)—, —C(O)—, —C(O)N(R′)—, or —N(R′)C(O)O—.
[1833] 649. The agent of any one of Embodiments 631−647, wherein L^{a} is an optionally substituted bivalent C₁₋₁₀ aliphatic wherein one or more methylene units are optionally and independently replaced with —O—, —S—, -Cy-, —N(R′)—, —C(O)—, —C(O)N(R′)—, or —N(R′)C(O)O—.
[1834] 650. The agent of any one of Embodiments 631−647, wherein L^{a} is a bivalent C₁₋₆ aliphatic wherein one or more methylene units are optionally and independently replaced with —O—, —S—, —N(R′)—, —C(O)—, —C(O)N(R′)—, or —N(R′)C(O)O—.
[1835] 651. The agent of Embodiment 648, wherein L^{a} is optionally substituted —(CH₂)ₙ— wherein n is 1, 2, 3, 4, 5, or 6.
[1836] 652. The agent of Embodiment 648, wherein L^{a} is —(CH₂)ₙ— wherein n is 1, 2, 3, 4, 5, or 6.
[1837] 653. The agent of Embodiment 648, wherein L^{a} is —CH₂—.
[1838] 654. The agent of any one of the preceding Embodiments, wherein X⁹ comprises a side chain which is or comprises an optionally substituted aromatic group, wherein each optional substituent of the aromatic group is independently selected from halogen, —OR, —R, —N(R)₂, —C(O)N(R)₂, or —CN, wherein each R is independently —H, C₁₋₄ alkyl or haloalkyl, or -Ph.
[1839] 655. The agent of any one of the preceding Embodiments, wherein X⁹ comprises a side chain which is or comprises an optionally substituted aromatic group, wherein each optional substituent of the aromatic group is independently selected from halogen, —OR, —R, —NH₂, —C(O)NH₂, -Ph, or —CN, wherein each R is independently C₁₋₄ alkyl or haloalkyl.
[1840] 656. The agent of any one of the preceding Embodiments, wherein X⁹ comprises a side chain which is or comprises an optionally substituted aromatic group, wherein each optional substituent of the aromatic group is independently selected from halogen, —OR, —R, —NH₂, —C(O)NH₂, -Ph, or —CN, wherein each R is independently C₁₋₂ alkyl or haloalkyl.
[1841] 657. The agent of any one of the preceding Embodiments, wherein X⁹ comprises a side chain which is or comprises an optionally substituted aromatic group, wherein each optional substituent of the aromatic group is independently selected from halogen, —OR, —R, NH₂, —C(O)NH₂, -Ph, or —CN, wherein each R is independently methyl optionally substituted with one or more halogen.
[1842] 658. The agent of any one of the preceding Embodiments, wherein X⁹ comprises a side chain which is or comprises an optionally substituted aromatic group, wherein each optional substituent of the aromatic group is independently selected from —F, —OR, —CH₃, —NH₂, —C(O)NH₂, -Ph, or —CN, wherein each R is independently methyl optionally substituted with one or more —F.
[1843] 659. The agent of any one of the preceding Embodiments, wherein X⁹ comprises a side chain which is or comprises an optionally substituted aromatic group, wherein each optional substituent of the aromatic group is independently selected from —F, —OR, —CH₃, —CF₃, —NH₂, —C(O)NH₂, -Ph, or —CN.
[1844] 660. The agent of any one of the preceding Embodiments, wherein X⁹ comprises a side chain which is or comprises an optionally substituted aromatic group, wherein each optional substituent of the aromatic group is independently selected from halogen, —CH₃, —CF₃, or —CN.
[1845] 661. The agent of any one of the preceding Embodiments, wherein X⁹ comprises a side chain which is or comprises an optionally substituted aromatic group optionally substituted at 2′-position.
[1846] 662. The agent of any one of the preceding Embodiments, wherein X⁹ comprises a side chain which is or comprises an unsubstituted aromatic group.
[1847] 663. The agent of any one of the preceding Embodiments, wherein X⁹ is Phe.
[1848] 664. The agent of any one of the preceding Embodiments, wherein X¹⁰ is selected from Asn, Val, Gln, Leu, Thr, Ser, Phe, Ala, Hse, Cit, iPrLys, S7, S5, Cha, PyrS, S(Ome), [AzAc]Lys, nLeu, 2F3MeF, 3F3MeF, and 4F3MeF.
[1849] 665. The agent of any one of the preceding Embodiments, wherein X¹⁰ is selected from [4MePpzPip]GlnR, [4Pippip]GlnR, [4PyPip]GlnR, [CH₂NMe2]TriAzDap, [CH₂Ppz]TriAzDap, [H4IAP]GlnR, [Me2NPrPip]GlnR, [Morph]GlnR, [MorphCH2]TriAzDap, [NHBn]GlnR, [Ppz]GlnR, [RDMAPyr]GlnR, [SO2MorphCH2]TriAzDap, [TfePpz]GlnR, 4BrF, AcLys, F2PipNva, Me2Asn, Me2Gln, MePpzAsn, MorphAsn, MorphGln, MorphNva, MeAsn, 2F3MeF, 3F3MeF, 4F3MeF, Abu, Ala, Arg, Asn, Cha, Cit, dSer, Gln, His, hLeu, Hse, iPrLys, Leu, Lys, nLeu, Npg, Phe, PyrS, PyrS2, R5, S(Ome), S5, S7, Ser, Thr, Trp, and Val.
[1850] 666. The agent of any one of the preceding Embodiments, wherein X¹⁰ is selected from [4MePpzPip]GlnR, [4Pippip]GlnR, [4PyPip]GlnR, [CH₂NMe2]TriAzDap, [CH₂Ppz]TriAzDap, [H4IAP]GlnR, [Me2NPrPip]GlnR, [Morph]GlnR, [MorphCH2]TriAzDap, [NHBn]GlnR, [Ppz]GlnR, [RDMAPyr]GlnR, [SO2MorphCH2]TriAzDap, [TfePpz]GlnR, 4BrF, AcLys, F2PipNva, Me2Asn, Me2Gln, MePpzAsn, MorphAsn, MorphGln, MorphNva, and MeAsn.
[1851] 667. The agent of any one of the preceding Embodiments, wherein X¹⁰ is selected from 2F3MeF, 3F3MeF, 4F3MeF, Abu, Ala, Arg, Asn, Cha, Cit, dSer, Gln, His, hLeu, Hse, iPrLys, Leu, Lys, nLeu, Npg, Phe, PyrS, PyrS2, R5, S(Ome), S5, S7, Ser, Thr, Trp, and Val.
[1852] 668. The agent of any one of the preceding Embodiments, wherein X¹⁰ comprises a side chain comprising a polar group.
[1853] 669. The agent of any one of the preceding Embodiments, wherein X¹⁰ comprises a side chain comprising —OH.
[1854] 670. The agent of any one of the preceding Embodiments, wherein X¹⁰ is —N(R^{a1})-L^{a1}-C(R^{a2})(R^{a3})-L^{a2}-C(O)—.
[1855] 671. The agent of Embodiment 670, wherein R^{a1} is —H.
[1856] 672. The agent of any one of Embodiments 670−671, wherein R^{a3} is —H.
[1857] 673. The agent of any one of Embodiments 670−671, wherein R^{a3} is optionally substituted C₁₋₆ aliphatic.
[1858] 674. The agent of any one of Embodiments 670−673, wherein L^{a1} is a covalent bond.
[1859] 675. The agent of any one of Embodiments 670−674, wherein L^{a2} is a covalent bond.
[1860] 676. The agent of any one of Embodiments 670−675, wherein R^{a2} is -L″-R.
[1861] 677. The agent of any one of Embodiments 670−675, wherein R^{a2} is -L″-Cy-R.
[1862] 678. The agent of any one of Embodiments 676−677, wherein R is hydrogen or optionally substituted C₁₋₁₀ aliphatic.
[1863] 679. The agent of any one of Embodiments 676−677, wherein R is optionally substituted C₁₋₁₀ aliphatic.
[1864] 680. The agent of any one of Embodiments 676−677, wherein R is C₁₋₁₀ aliphatic.
[1865] 681. The agent of any one of Embodiments 676−677, wherein R is C₁₋₁₀ alkyl.
[1866] 682. The agent of any one of Embodiments 676−677, wherein R is optionally substituted phenyl.
[1867] 683. The agent of any one of Embodiments 670−675, R^{a2} is -L″—C(O)N(R′)₂.
[1868] 684. The agent of any one of Embodiments 670−675, R^{a2} is -L″—OH.
[1869] 685. The agent of any one of Embodiments 670−684, wherein L″ is a covalent bond or an optionally substituted bivalent C₁₋₁₀ aliphatic wherein one or more methylene units are optionally and independently replaced with —O—, —S—, -Cy-, —N(R′)—, —C(O)—, —C(O)N(R′)—, or —N(R′)C(O)O—.
[1870] 686. The agent of any one of Embodiments 670−684, wherein L″ is an optionally substituted bivalent C₁₋₁₀ aliphatic wherein one or more methylene units are optionally and independently replaced with —O—, —S—, -Cy-, —N(R′)—, —C(O)—, —C(O)N(R′)—, or —N(R′)C(O)O—.
[1871] 687. The agent of any one of Embodiments 670−684, wherein L″ is a bivalent C₁₋₆ aliphatic wherein one or more methylene units are optionally and independently replaced with —O—, —S—, —N(R′)—, —C(O)—, —C(O)N(R′)—, or —N(R′)C(O)O—.
[1872] 688. The agent of any one of Embodiments 670−684, wherein L″ is optionally substituted —(CH₂)ₙ— wherein n is 1, 2, 3, 4, 5, or 6.
[1873] 689. The agent of any one of Embodiments 670−684, wherein L″ is —(CH₂)ₙ— wherein n is 1, 2, 3, 4, 5, or 6.
[1874] 690. The agent of any one of the preceding Embodiments, wherein X¹⁰ is Leu, Thr or Hse.
[1875] 691. The agent of any one of Embodiments 1−664, wherein X¹⁰ comprises a side chain comprising an amide group.
[1876] 692. The agent of any one of Embodiments 1−664, wherein X¹⁰ comprises a hydrophobic side chain.
[1877] 693. The agent of any one of Embodiments 1−664, wherein X¹⁰ comprises a hydrocarbon side chain.
[1878] 694. The agent of Embodiment 693, wherein X¹⁰ is Leu.
[1879] 695. The agent of any one of Embodiments 1−664, wherein X¹⁰ comprises a side chain comprising an optionally substituted aromatic group.
[1880] 696. The agent of Embodiment 695, wherein the aromatic group is optionally substituted phenyl.
[1881] 697. The agent of Embodiment 695, wherein X¹⁰ is Phe.
[1882] 698. The agent of any one of the preceding Embodiments, wherein X¹¹ is selected from S8, PyrS2, PyrS, S7, PyrS3, SeN, Ala, Az, Phe, S4, S6, SdN, S10, S5, SgN, and PyrS1.
[1883] 699. The agent of any one of the preceding Embodiments, wherein X¹¹ is selected from Az2, Az3, PyrR2, PyrS4, SeNc5, SPip1, SPip2, SPip3, Aib, Ala, Az, Leu, Phe, PyrS, PyrS1, PyrS2, PyrS3, S10, S4, S5, S6, S7, S8, SdN, SeN, and SgN.
[1884] 700. The agent of any one of the preceding Embodiments, wherein X″ is selected from Az2, Az3, PyrR2, PyrS4, SeNc5, SPip1, SPip2, and SPip3.
[1885] 701. The agent of any one of the preceding Embodiments, wherein X″ is selected from Aib, Ala, Az, Leu, Phe, PyrS, PyrS1, PyrS2, PyrS3, S10, S4, S5, S6, S7, S8, SdN, SeN, and SgN.
[1886] 702. The agent of any one of the preceding Embodiments, wherein X″ is stapled with X⁴.
[1887] 703. The agent of Embodiment 702, wherein X″ is PyrS2.
[1888] 704. The agent of Embodiment 702, wherein X″ is PyrS3.
[1889] 705. The agent of Embodiment 702, wherein X″ is S8.
[1890] 706. The agent of any one of Embodiments 1−698, wherein X″ is not stapled.
[1891] 707. The agent of Embodiment 705, wherein X″ is Ala or Phe.
[1892] 708. The agent of any one of the preceding Embodiments, wherein X² is selected from Phe, 3Thi, 2ClF, 3FF, 20MeF, 2FF, Pff, Asp, 2CBMF, 3ClF, 3F3MeF, 1NapA, 2NapA, 2PyrA, 4CBMF, 4COOHF, 4F3MeF, Tyr, 2BrF, 2F3MeF, 2Thi, 4PyrA, Cha, CypA, hPhe, Trp, dPhe, [Acryl]Dap, 1meH, 23FF, 2MeF, 34FF, 30MeF, 3PyrA, 4ClF, 4CNF, Ala, Glu, His, 2CNF, 2N02F, 35FF, 3CBMF, 3CNF, 3MeF, 3meH, 4FF, 4MeF, 4Thz, Asn, BztA, and hTyr.
[1893] 709. The agent of any one of the preceding Embodiments, wherein X² is selected from [CyPr]-3SF, [Ph]3SF, [Ph]-3SF, 3BrF, 3CBMF, Cba, [Acryl]Dap, 1meH, 1NapA, 23FF, 2BrF, 2CBMF, 2ClF, 2CNF, 2F3MeF, 2FF, 2MeF, 2NapA, 2N02F, 20MeF, 2pyrA, 2Thi, 34FF, 35FF, 3ClF, 3CNF, 3F3MeF, 3FF, 3MeF, 3meH, 30MeF, 3PyrA, 3thi, 4CBMF, 4ClF, 4CNF, 4COOHF, 4F3MeF, 4FF, 4MeF, 4PyrA, 4Thz, Ala, Asn, Asp, BztA, Cha, CypA, dPhe, Gln, Glu, His, hPhe, hTyr, Leu, Npg, Pff, Phe, PyrS2, Trp, and Tyr.
[1894] 710. The agent of any one of the preceding Embodiments, wherein X² is selected from [CyPr]-3SF, [Ph]3SF, [Ph]-3SF, 3BrF, 3CBMF, and Cba.
[1895] 711. The agent of any one of the preceding Embodiments, wherein X² is selected from [Acryl]Dap, 1meH, 1NapA, 23FF, 2BrF, 2CBMF, 2ClF, 2CNF, 2F3MeF, 2FF, 2MeF, 2NapA, 2N02F, 20MeF, 2pyrA, 2Thi, 34FF, 35FF, 3ClF, 3CNF, 3F3MeF, 3FF, 3MeF, 3meH, 30MeF, 3PyrA, 3thi, 4CBMF, 4ClF, 4CNF, 4COOHF, 4F3MeF, 4FF, 4MeF, 4PyrA, 4Thz, Ala, Asn, Asp, BztA, Cha, CypA, dPhe, Gln, Glu, His, hPhe, hTyr, Leu, Npg, Pff, Phe, PyrS2, Trp, and Tyr.
[1896] 712. The agent of any one of the preceding Embodiments, wherein X² comprises a side chain which is or comprises an optionally substituted aromatic group.
[1897] 713. The agent of any one of the preceding Embodiments, wherein X² is —N(R^{a1})-Lal-C(R^{a2})(R^{a3})-L^{a2}-C(O)—.
[1898] 714. The agent of Embodiment 713, wherein R^{a1} is —H.
[1899] 715. The agent of any one of Embodiments 713-714, wherein R^{a3} is —H.
[1900] 716. The agent of any one of Embodiments 713-714, wherein R^{a3} is optionally substituted C₁₋₆ aliphatic.
[1901] 717. The agent of any one of Embodiments 713-716, wherein L^{a1} is a covalent bond.
[1902] 718. The agent of any one of Embodiments 713-717, wherein R^{a2} is -L^{a}-R, wherein R is or comprises an aromatic group.
[1903] 719. The agent of Embodiment 718, wherein R is optionally substituted 6-10 membered aryl
[1904] 720. The agent of Embodiment 718, wherein R is optionally substituted phenyl
[1905] 721. The agent of Embodiment 718, wherein R is phenyl
[1906] 722. The agent of Embodiment 718, wherein R is optionally substituted naphthyl
[1907] 723. The agent of Embodiment 718, wherein R is naphthyl
[1908] 724. The agent of Embodiment 718, wherein R is optionally substituted 5-membered heteroaryl having 1-4 heteroatoms
[1909] 725. The agent of Embodiment 718, wherein R is optionally substituted 6-membered heteroaryl having 1-4 heteroatoms
[1910] 726. The agent of Embodiment 718, wherein R is optionally substituted 9-membered bicyclic heteroaryl having 1-4 heteroatoms
[1911] 727. The agent of Embodiment 718, wherein R is optionally substituted 10-membered bicyclic heteroaryl having 1-4 heteroatoms
[1912] 728. The agent of any one of Embodiments 724-727, wherein a heteroatom is nitrogen
[1913] 729. The agent of any one of Embodiments 724-728, wherein a heteroatom is oxygen
[1914] 730. The agent of any one of Embodiments 724-729, wherein a heteroatom is sulfur
[1915] 731. The agent of any one of Embodiments 724-727, wherein the heteroaryl has only one heteroatom
[1916] 732. The agent of Embodiment 731, wherein the heteroatom is nitrogen.
[1917] 733. The agent of Embodiment 731, wherein the heteroatom is oxygen.
[1918] 734. The agent of Embodiment 731, wherein the heteroatom is sulfur.
[1919] 735. The agent of any one of Embodiments 718-734, wherein L^{a} is a covalent bond or an optionally substituted bivalent C₁₋₁₀ aliphatic wherein one or more methylene units are optionally and independently replaced with —O—, —S—, -Cy-, —N(R′)—, —C(O)—, —C(O)N(R′)—, or —N(R′)C(O)O—.
[1920] 736. The agent of any one of Embodiments 718-734, wherein L^{a} is an optionally substituted bivalent C₁₋₁₀ aliphatic wherein one or more methylene units are optionally and independently replaced with —O—, —S—, -Cy-, —N(R′)—, —C(O)—, —C(O)N(R′)—, or —N(R′)C(O)O—.
[1921] 737. The agent of any one of Embodiments 718-734, wherein L^{a} is a bivalent C₁₋₆ aliphatic wherein one or more methylene units are optionally and independently replaced with —O—, —S—, —N(R′)—, —C(O)—, —C(O)N(R′)—, or —N(R′)C(O)O—.
[1922] 738. The agent of Embodiment 735, wherein L^{a} is optionally substituted —(CH₂)ₙ— wherein n is 1, 2, 3, 4, 5, or 6.
[1923] 739. The agent of Embodiment 735, wherein L^{a} is —(CH₂)ₙ— wherein n is 1, 2, 3, 4, 5, or 6.
[1924] 740. The agent of Embodiment 735, wherein L^{a} is —CH₂—.
[1925] 741. The agent of any one of the preceding Embodiments, wherein X² comprises a side chain which is or comprises an optionally substituted aromatic group, wherein each optional substituent of the aromatic group is independently selected from halogen, —OR, —R, —N(R)₂, —C(O)N(R)₂, or —CN, wherein each R is independently —H, C₁₋₄ alkyl or haloalkyl, or -Ph.
[1926] 742. The agent of any one of the preceding Embodiments, wherein X² comprises a side chain which is or comprises an optionally substituted aromatic group, wherein each optional substituent of the aromatic group is independently selected from halogen, —OR, —R, —NH₂, —C(O)NH₂, -Ph, or —CN, wherein each R is independently C₁₋₄ alkyl or haloalkyl.
[1927] 743. The agent of any one of the preceding Embodiments, wherein X² comprises a side chain which is or comprises an optionally substituted aromatic group, wherein each optional substituent of the aromatic group is independently selected from halogen, —OR, —R, —NH₂, —C(O)NH₂, -Ph, or —CN, wherein each R is independently C₁₋₂ alkyl or haloalkyl.
[1928] 744. The agent of any one of the preceding Embodiments, wherein X² comprises a side chain which is or comprises an optionally substituted aromatic group, wherein each optional substituent of the aromatic group is independently selected from halogen, —OR, —R, NH₂, —C(O)NH₂, -Ph, or —CN, wherein each R is independently methyl optionally substituted with one or more halogen.
[1929] 745. The agent of any one of the preceding Embodiments, wherein X² comprises a side chain which is or comprises an optionally substituted aromatic group, wherein each optional substituent of the aromatic group is independently selected from —F, —OR, —CH₃, —NH₂, —C(O)NH₂, -Ph, or —CN, wherein each R is independently methyl optionally substituted with one or more —F.
[1930] 746. The agent of any one of the preceding Embodiments, wherein X² comprises a side chain which is or comprises an optionally substituted aromatic group, wherein each optional substituent of the aromatic group is independently selected from —F, —OR, —CH₃, —CF₃, —NH₂, —C(O)NH₂, -Ph, or —CN.
[1931] 747. The agent of any one of the preceding Embodiments, wherein X² comprises a side chain which is or comprises an optionally substituted aromatic group, wherein each optional substituent of the aromatic group is independently selected from halogen, —CH₃, —CF₃, or —CN.
[1932] 748. The agent of any one of the preceding Embodiments, wherein X² comprises a side chain which is or comprises an optionally substituted aromatic group optionally substituted at 2′-position.
[1933] 749. The agent of any one of the preceding Embodiments, wherein X² comprises a side chain which is or comprises an unsubstituted aromatic group.
[1934] 750. The agent of any one of Embodiments 741-749, wherein the aromatic group is a 5-membered heteroaryl group.
[1935] 751. The agent of any one of the preceding Embodiments, wherein X² is 3Thi.
[1936] 752. The agent of any one of Embodiments 741-749, wherein the aromatic group is a phenyl group.
[1937] 753. The agent of any one of Embodiment 752, wherein X² is 2ClF.
[1938] 754. The agent of any one of Embodiment 752, wherein X² is Phe.
[1939] 755. The agent of any one of Embodiment 752, wherein X² is Phe wherein the phenyl is 2′-substituted.
[1940] 756. The agent of any one of Embodiment 752, wherein X² is 2FF, 2ClF, 2BrF, 2F3MeF, 2MeF, or 2CNF.
[1941] 757. The agent of any one of the preceding Embodiments, wherein X¹³ is selected from BztA, Trp, 2NapA, 1NapA, WCHO, 5CpW, 5FW, Ala, aMeW, H2Trp, His, Phe, 23FF, 34FF, 340MeF, 1MeW, 5CF3W, 5ClW, 5MeOW, 6ClW, 6F1NapA, 7F1NapA, 7FW, Bip, and Qui.
[1942] 758. The agent of any one of the preceding Embodiments, wherein X¹³ is selected from 2F3MeW, 34ClF, 34MeF, 3Br4FF, 3BrF, 4ClBztA, 4ClW, 4FW, 5IndA, 7AzaW, 7ClBztA, 7FBztA, Cba, RbMe2NapA, RbMeBztA, SbMe2NapA, SbMeBztA, 1MeW, 1NapA, 23FF, 2F3MeF, 2NapA, 34FF,
[1943] 340MeF, 3ClF, 3Thi, 4ClF, 5CF3W, 5ClW, 5CpW, 5FW, 5MeOW, 6ClW, 6F1NapA, 7F1NapA, 7FW, Ala, aMeW, Bip, BztA, Cha, H2Trp, His, Phe, PyrS2, Qui, Trp, Tyr, and WCHO.
[1944] 759. The agent of any one of the preceding Embodiments, wherein X¹³ is selected from 2F3MeW, 34ClF, 34MeF, 3Br4FF, 3BrF, 4ClBztA, 4ClW, 4FW, 5IndA, 7AzaW, 7ClBztA, 7FBztA, Cba, RbMe2NapA, RbMeBztA, SbMe2NapA, and SbMeBztA.
[1945] 760. The agent of any one of the preceding Embodiments, wherein X¹³ is selected from 1MeW, 1NapA, 23FF, 2F3MeF, 2NapA, 34FF, 340MeF, 3ClF, 3Thi, 4ClF, 5CF3W, 5ClW, 5CpW, 5FW, 5MeOW, 6ClW, 6F1NapA, 7F1NapA, 7FW, Ala, aMeW, Bip, BztA, Cha, H2Trp, His, Phe, PyrS2, Qui, Trp, Tyr, and WCHO.
[1946] 761. The agent any one of the preceding Embodiments, wherein the side chain of X¹³ comprises an optionally substituted aromatic group.
[1947] 762. The agent of any one of the preceding Embodiments, wherein X¹³ is —N(R^{a1})-L^{a1}-C(R^{a2})(R^{a3})-L^{a2}-C(O)—.
[1948] 763. The agent of Embodiment 762, wherein R^{a1} is —H.
[1949] 764. The agent of any one of Embodiments 762-763, wherein R^{a3} is —H.
[1950] 765. The agent of any one of Embodiments 762-763, wherein R^{a3} is optionally substituted C₁₋₆ aliphatic.
[1951] 766. The agent of any one of Embodiments 762-765, wherein L^{a1} is a covalent bond
[1952] 767. The agent of any one of Embodiments 762-766, wherein R^{a2} is -L^{a}-R, wherein R is or comprises an aromatic group.
[1953] 768. The agent of Embodiment 767, wherein R is optionally substituted 6-10 membered aryl.
[1954] 769. The agent of Embodiment 767, wherein R is optionally substituted phenyl.
[1955] 770. The agent of Embodiment 767, wherein R is phenyl.
[1956] 771. The agent of Embodiment 767, wherein R is optionally substituted naphthyl.
[1957] 772. The agent of Embodiment 767, wherein R is naphthyl.
[1958] 773. The agent of Embodiment 767, wherein R is optionally substituted 5-membered heteroaryl having 1-4 heteroatoms.
[1959] 774. The agent of Embodiment 767, wherein R is optionally substituted 6-membered heteroaryl having 1-4 heteroatoms.
[1960] 775. The agent of Embodiment 767, wherein R is optionally substituted 9-membered bicyclic heteroaryl having 1-4 heteroatoms.
[1961] 776. The agent of Embodiment 767, wherein R is optionally substituted 10-membered bicyclic heteroaryl having 1-4 heteroatoms.
[1962] 777. The agent of any one of Embodiments 773-776, wherein a heteroatom is nitrogen.
[1963] 778. The agent of any one of Embodiments 773-776, wherein a heteroatom is oxygen.
[1964] 779. The agent of any one of Embodiments 773-776, wherein a heteroatom is sulfur.
[1965] 780. The agent of any one of Embodiments 773-776, wherein the heteroaryl has only one heteroatom.
[1966] 781. The agent of Embodiment 780, wherein the heteroatom is nitrogen.
[1967] 782. The agent of Embodiment 780, wherein the heteroatom is oxygen.
[1968] 783. The agent of Embodiment 780, wherein the heteroatom is sulfur.
[1969] 784. The agent of any one of Embodiments 767-783, wherein L^{a} is a covalent bond or an optionally substituted bivalent C₁₋₁₀ aliphatic wherein one or more methylene units are optionally and independently replaced with —O—, —S—, -Cy-, —N(R′)—, —C(O)—, —C(O)N(R′)—, or —N(R′)C(O)O—.
[1970] 785. The agent of any one of Embodiments 767-783, wherein L^{a} is an optionally substituted bivalent C₁₋₁₀ aliphatic wherein one or more methylene units are optionally and independently replaced with —O—, —S—, -Cy-, —N(R′)—, —C(O)—, —C(O)N(R′)—, or —N(R′)C(O)O—.
[1971] 786. The agent of any one of Embodiments 767-783, wherein L^{a} is a bivalent C₁₋₆ aliphatic wherein one or more methylene units are optionally and independently replaced with —O—, —S—, —N(R′)—, —C(O)—, —C(O)N(R′)—, or —N(R′)C(O)O—.
[1972] 787. The agent of Embodiment 784, wherein L^{a} is optionally substituted —(CH₂)ₙ— wherein n is 1, 2, 3, 4, 5, or 6.
[1973] 788. The agent of Embodiment 784, wherein L^{a} is —(CH₂)ₙ— wherein n is 1, 2, 3, 4, 5, or 6.
[1974] 789. The agent of Embodiment 784, wherein L^{a} is —CH₂—.
[1975] 790. The agent any one of the preceding Embodiments, wherein the side chain of X¹³ comprises an optionally substituted 8-10 membered bicyclic aromatic group.
[1976] 791. The agent any one of the preceding Embodiments, wherein the side chain of X¹³ comprises an optionally substituted 9-membered bicyclic heteroaryl group having 1-3 heteroatoms.
[1977] 792. The agent of any one of the preceding Embodiments, wherein X¹³ is BtzA.
[1978] 793. The agent of any one of Embodiments 1-791, wherein X¹³ is Trp.
[1979] 794. The agent of any one of Embodiments 1-791, wherein X¹³ is 1NapA.
[1980] 795. The agent of any one of Embodiments 1-791, wherein X¹³ is 2NapA.
[1981] 796. The agent of any one of the preceding Embodiments, wherein p14 is 1.
[1982] 797. The agent of any one of the preceding Embodiments, wherein X¹⁴ is selected from Gln, His, Ser, dThr, Thr, Ala, Hse, Asn, Leu, Aib, Alaol, Throl, Leuol, dAsn, dGln, dHis, Tyr, [AzAc]Lys, 1MeH, 3MeH, 4TriA, dSer, NMeHis, NMeS, Pro, Trp, Val, Lys, MorphAla, 2FurA, Abu, Arg, Dab, iPrLys, Phe, Pheol, and Prool.
[1983] 798. The agent of any one of the preceding Embodiments, wherein X¹⁴ is selected from [3C]TriAzLys, [4F3CPip]GlnR, [4MePpzPip]GlnR, [4Pippip]GlnR, [AcPpz]GlnR, [bismethoxyethylamine]GlnR, [Me2NPrPip]GlnR, [Morph]GlnR, [NHEt]GlnR, [NMe2]GlnR, [Pip]GlnR, [PropynPEG14]Lys, [RDMAPyr]GlnR, [TfePpz]GlnR, AcLys, BnBoroleK, F2PipNva, GlnR, Me2Asn, Me2Gln, MePpzAsn, Met20, MorphAsn, MorphGln, MorphNva, dAla, MeAsn, 1MeH, 2cbmf, 2F3MeF, 2FurA, 3cbmf, 3MeH, 4TriA, Abu, Aib, Ala, Alaol, Arg, Asn, Asp, BztA, Cha, Dab, dAsn, dGln, dHis, dSer, dThr, Gln, His, Hse, iPrLys, Leu, Leuol, Lys, MorphAla, NMeHis, NMeS, Npg, Phe, Pheol, Pro, Prool, PyrS2, S5, Ser, Thr, Throl, Trp, Tyr, and Val.
[1984] 799. The agent of any one of the preceding Embodiments, wherein X¹⁴ is selected from [3C]TriAzLys, [4F3CPip]GlnR, [4MePpzPip]GlnR, [4Pippip]GlnR, [AcPpz]GlnR, [bismethoxyethylamine]GlnR, [Me2NPrPip]GlnR, [Morph]GlnR, [NHEt]GlnR, [NMe2]GlnR, [Pip]GlnR, [PropynPEG14]Lys, [RDMAPyr]GlnR, [TfePpz]GlnR, AcLys, BnBoroleK, F2PipNva, GlnR, Me2Asn, Me2Gln, MePpzAsn, Met20, MorphAsn, MorphGln, MorphNva, dAla, and MeAsn.
[1985] 800. The agent of any one of the preceding Embodiments, wherein X¹⁴ is selected from 1MeH, 2cbmf, 2F3MeF, 2FurA, 3cbmf, 3MeH, 4TriA, Abu, Aib, Ala, Alaol, Arg, Asn, Asp, BztA, Cha, Dab, dAsn, dGln, dHis, dSer, dThr, Gln, His, Hse, iPrLys, Leu, Leuol, Lys, MorphAla, NMeHis, NMeS, Npg, Phe, Pheol, Pro, Prool, PyrS2, S5, Ser, Thr, Throl, Trp, Tyr, and Val.
[1986] 801. The agent of any one of the preceding Embodiments, wherein X¹⁴ comprises a side chain comprising a polar group.
[1987] 802. The agent of any one of the preceding Embodiments, wherein X¹⁴ is —N(R^{a1})-L^{a1}-C(R^{a2})(R^{a3})-L^{a2}-C(O)—.
[1988] 803. The agent of Embodiment 802, wherein R^{a1} is —H.
[1989] 804. The agent of any one of Embodiments 802-803, wherein R^{a3} is —H.
[1990] 805. The agent of any one of Embodiments 802-803, wherein R^{a3} is optionally substituted C₁₋₆ aliphatic.
[1991] 806. The agent of any one of Embodiments 802-805, wherein L^{a1} is a covalent bond.
[1992] 807. The agent of any one of Embodiments 802-806, wherein L^{a2} is a covalent bond.
[1993] 808. The agent of any one of Embodiments 802-807, wherein R^{a2} is -L″-R.
[1994] 809. The agent of any one of Embodiments 802-807, wherein R^{a2} is -L″-Cy-R.
[1995] 810. The agent of any one of Embodiments 802-807, wherein R^{a2} is -L″—C(O)OR.
[1996] 811. The agent of any one of Embodiments 802-807, wherein R^{a2} is -L″—C(O)N(R′)₂.
[1997] 812. The agent of any one of Embodiments 802-807, wherein R^{a2} is -L″—C(O)N(R)₂.
[1998] 813. The agent of any one of Embodiments 804-812, wherein R is hydrogen or optionally substituted C₁₋₁₀ aliphatic.
[1999] 814. The agent of any one of Embodiments 804-812, wherein R is hydrogen.
[2000] 815. The agent of any one of Embodiments 804-812, wherein R is optionally substituted C₁₋₁₀ aliphatic.
[2001] 816. The agent of any one of Embodiments 804-812, wherein R is C₁₋₁₀ aliphatic.
[2002] 817. The agent of any one of Embodiments 804-812, wherein R is C₁₋₁₀ alkyl.
[2003] 818. The agent of any one of Embodiments 802-807, wherein R^{a2} is -L″—OH.
[2004] 819. The agent of any one of Embodiments 802-818, wherein L″ is a covalent bond or an optionally substituted bivalent C₁₋₁₀ aliphatic wherein one or more methylene units are optionally and independently replaced with —O—, —S—, -Cy-, —N(R′)—, —C(O)—, —C(O)N(R′)—, or —N(R′)C(O)O—.
[2005] 820. The agent of any one of Embodiments 802-818, wherein L″ is an optionally substituted bivalent C₁₋₁₀ aliphatic wherein one or more methylene units are optionally and independently replaced with —O—, —S—, -Cy-, —N(R′)—, —C(O)—, —C(O)N(R′)—, or —N(R′)C(O)O—.
[2006] 821. The agent of any one of Embodiments 802-818, wherein L″ is a bivalent C₁₋₆ aliphatic wherein one or more methylene units are optionally and independently replaced with —O—, —S—, —N(R′)—, —C(O)—, —C(O)N(R′)—, or —N(R′)C(O)O—.
[2007] 822. The agent of any one of Embodiments 802-818, wherein L″ is optionally substituted —(CH₂)ₙ— wherein n is 1, 2, 3, 4, 5, or 6.
[2008] 823. The agent of any one of Embodiments 802-818, wherein L″ is —(CH₂)ₙ— wherein n is 1, 2, 3, 4, 5, or 6.
[2009] 824. The agent of any one of the preceding Embodiments, wherein X¹⁴ comprises a side chain comprising —OH.
[2010] 825. The agent of any one of the preceding Embodiments, wherein X¹⁴ comprises a side chain comprising an amide group.
[2011] 826. The agent of any one of the preceding Embodiments, wherein X¹⁴ is Gln.
[2012] 827. The agent of any one of Embodiments 1-792, wherein p14 is 0.
[2013] 828. The agent of any one of the preceding Embodiments, wherein p15 is 1.
[2014] 829. The agent of any one of the preceding Embodiments, wherein X¹⁵ is —N(R^{a1})-L^{a1}-C(R^{a2})(R^{a3})-L^{a2}-C(O)—.
[2015] 830. The agent of Embodiment 829, wherein R^{a1} is —H.
[2016] 831. The agent of any one of Embodiments 829-830, wherein R^{a3} is —H.
[2017] 832. The agent of any one of Embodiments 829-830, wherein R^{a3} is optionally substituted C₁₋₆ aliphatic.
[2018] 833. The agent of any one of Embodiments 829-832, wherein L^{a1} is a covalent bond.
[2019] 834. The agent of any one of Embodiments 829-833, wherein L^{a2} is a covalent bond.
[2020] 835. The agent of any one of Embodiments 829-834, wherein R^{a2} is -L″-R.
[2021] 836. The agent of any one of Embodiments 829-834, wherein R^{a2} is -L″-Cy-R.
[2022] 837. The agent of any one of Embodiments 829-834, wherein R^{a2} is -L″—C(O)OR.
[2023] 838. The agent of any one of Embodiments 829-834, wherein R^{a2} is -L″—C(O)N(R′)₂.
[2024] 839. The agent of any one of Embodiments 829-834, wherein R^{a2} is -L″—C(O)N(R)₂.
[2025] 840. The agent of any one of Embodiments 835-839, wherein R is hydrogen or optionally substituted C₁₋₁₀ aliphatic.
[2026] 841. The agent of any one of Embodiments 835-839, wherein R is hydrogen.
[2027] 842. The agent of any one of Embodiments 835-839, wherein R is optionally substituted C₁₋₁₀ aliphatic.
[2028] 843. The agent of any one of Embodiments 835-839, wherein R is C₁₋₁₀ aliphatic.
[2029] 844. The agent of any one of Embodiments 835-839, wherein R is C₁₋₁₀ alkyl.
[2030] 845. The agent of any one of Embodiments 829-834, wherein R2 is -L″—OH.
[2031] 846. The agent of any one of Embodiments 829-845, wherein L″ is a covalent bond or an optionally substituted bivalent C₁₋₁₀ aliphatic wherein one or more methylene units are optionally and independently replaced with —O—, —S—, -Cy-, —N(R′)—, —C(O)—, —C(O)N(R′)—, or —N(R′)C(O)O—.
[2032] 847. The agent of any one of Embodiments 829-845, wherein L″ is an optionally substituted bivalent C₁₋₁₀ aliphatic wherein one or more methylene units are optionally and independently replaced with —O—, —S—, -Cy-, —N(R′)—, —C(O)—, —C(O)N(R′)—, or —N(R′)C(O)O—.
[2033] 848. The agent of any one of Embodiments 829-845, wherein L″ is a bivalent C₁₋₆ aliphatic wherein one or more methylene units are optionally and independently replaced with —O—, —S—, —N(R′)—, —C(O)—, —C(O)N(R′)—, or —N(R′)C(O)O—.
[2034] 849. The agent of any one of Embodiments 829-845, wherein L″ is a bivalent C₁₋₆ aliphatic wherein one or more methylene units are optionally and independently replaced with —O—, —S—, —N(R′)—, —C(O)—, —C(O)N(R′)—, or —N(R′)C(O)O—.
[2035] 850. The agent of any one of Embodiments 829-845, wherein L″ is —(CH₂)ₙ— wherein n is 1, 2, 3, 4, 5, or 6.
[2036] 851. The agent of any one of the preceding Embodiments, wherein X⁵ is selected from 6AmHex, 6AzHex, Aib, Ala, dAla, dIle, Ile, and Lys.
[2037] 852. The agent of any one of the preceding Embodiments, wherein X⁵ is selected from [1Napc]Lys, [1NapPr]Lys, [22PhPr]Lys, [2Napc]Lys, [35CF3PhPr]Lys, [4MePipBz]Lys, [AdamantC]Lys, [AzAc]Lys, [Bua]Lys, [Me2NCBz]Lys, [Me3AdamantC]Lys, [MeBipipAc]Lys, [MeMorphBz]Lys, [MePipAc]Lys, [MorphAc]Lys, [mPEG2]Lys, [mPEG4]Lys, [mPEG6]Lys, [mPEG8]Lys, [Oct]Lys, [PropynPEG1]Lys, [PropynPEG2]Lys, [PropynPEG3]Lys, [PropynPEG4]Lys, 6AmHex, 6AzHex, Aib, Ala, dAla, dIle, Ile, and Lys.
[2038] 853. The agent of any one of the preceding Embodiments, wherein X⁵ is selected from [3C]TriAzdLys, [3C]TriAzLys, [lithocholate]-Lys, [lithocholate-PEG2]-Lys, [Me2NCBz]Lys, [Me3AdamantC-PEG2]-Lys, [PropynPEG14]Lys, dAla, dIle, [1Napc]Lys, [1NapPr]Lys, [22PhPr]Lys, [2Napc]Lys, [35CF3PhPr]Lys, [4MePipBz]Lys, [AdamantC]Lys, [Bua]Lys, [Me3AdamantC]Lys, [Me3AdamantC]-Lys, [MeBipipAc]Lys, [MeMorphBz]Lys, [MePipAc]Lys, [MorphAc]Lys, [mPEG2]Lys, [mPEG4]Lys, [mPEG6]Lys, [mPEG8]Lys, [Oct]Lys, [PropynPEG1]Lys, [PropynPEG2]Lys, [PropynPEG3]Lys, [PropynPEG4]Lys, 6AmHex, Aib, Ala, Alaol, BztA, Gln, Ile, Leuol, Leu, Lys, NEt2, NHBn, NHCyHe, NHCyPr, NHEt, OH, Phe, Pheol, Prool, Throl, and Val.
[2039] 854. The agent of any one of the preceding Embodiments, wherein X⁵ is selected from [3C]TriAzdLys, [3C]TriAzLys, [lithocholate]-Lys, [lithocholate-PEG2]-Lys, [Me2NCBz]Lys, [Me3AdamantC-PEG2]-Lys, [PropynPEG14]Lys, dAla, and dIle.
[2040] 855. The agent of any one of the preceding Embodiments, wherein X⁵ is selected from [1Napc]Lys, [1NapPr]Lys, [22PhPr]Lys, [2Napc]Lys, [35CF3PhPr]Lys, [4MePipBz]Lys, [AdamantC]Lys, [Bua]Lys, [Me3AdamantC]Lys, [Me3AdamantC]-Lys, [MeBipipAc]Lys, [MeMorphBz]Lys, [MePipAc]Lys, [MorphAc]Lys, [mPEG2]Lys, [mPEG4]Lys, [mPEG6]Lys, [mPEG8]Lys, [Oct]Lys, [PropynPEG1]Lys, [PropynPEG2]Lys, [PropynPEG3]Lys, [PropynPEG4]Lys, 6AmHex, Aib, Ala, Alaol, BztA, Gln, Ile, Leuol, Leu, Lys, NEt2, NHBn, NHCyHe, NHCyPr, NHEt, OH, Phe, Pheol, Prool, Throl, and Val.
[2041] 856. The agent of any one of the preceding Embodiments, wherein X⁵ comprises a hydrophobic side chain.
[2042] 857. The agent of any one of the preceding Embodiments, wherein the side chain of X⁵ is C₁₋₁₀ alkyl.
[2043] 858. The agent of any one of Embodiments 1-852, wherein X⁵ is optionally substituted or labeled Lys.
[2044] 859. The agent of any one of Embodiments 1-827, wherein p15 is 0.
[2045] 860. The agent of any one of the preceding Embodiments, wherein p16 is 1.
[2046] 861. The agent of any one of the preceding Embodiments, wherein X¹⁶ is —N(R^{a1})-L^{a1}-C(R^{a2})(R^{a3})-L^{a2}-C(O)—.
[2047] 862. The agent of Embodiment 861, wherein R^{a1} is —H.
[2048] 863. The agent of any one of Embodiments 861-862, wherein R^{a3} is —H.
[2049] 864. The agent of any one of Embodiments 861-862, wherein R^{a3} is optionally substituted C₁₋₆ aliphatic.
[2050] 865. The agent of any one of Embodiments 861-864, wherein L^{a1} is a covalent bond.
[2051] 866. The agent of any one of Embodiments 861-865, wherein L^{a2} is a covalent bond.
[2052] 867. The agent of any one of Embodiments 861-866, wherein R^{a2} is -L″-R.
[2053] 868. The agent of any one of Embodiments 861-866, wherein R^{a2} is -L″-Cy-R.
[2054] 869. The agent of any one of Embodiments 861-866, wherein R^{a2} is -L″—C(O)OR.
[2055] 870. The agent of any one of Embodiments 861-866, wherein R^{a2} is -L″—C(O)N(R′)₂.
[2056] 871. The agent of any one of Embodiments 861-866, wherein R^{a2} is -L″—C(O)N(R)₂.
[2057] 872. The agent of any one of Embodiments 867-871, wherein R is hydrogen or optionally substituted C₁₋₁₀ aliphatic.
[2058] 873. The agent of any one of Embodiments 867-871, wherein R is hydrogen.
[2059] 874. The agent of any one of Embodiments 867-871, wherein R is optionally substituted C₁₋₁₀ aliphatic.
[2060] 875. The agent of any one of Embodiments 867-871, wherein R is C₁₋₁₀ aliphatic.
[2061] 876. The agent of any one of Embodiments 867-871, wherein R is C₁₋₁₀ alkyl.
[2062] 877. The agent of any one of Embodiments 861-866, wherein R^{a2} is -L″—OH.
[2063] 878. The agent of any one of Embodiments 861-877, wherein L″ is a covalent bond or an optionally substituted bivalent C₁₋₁₀ aliphatic wherein one or more methylene units are optionally and independently replaced with —O—, —S—, -Cy-, —N(R′)—, —C(O)—, —C(O)N(R′)—, or —N(R′)C(O)O—.
[2064] 879. The agent of any one of Embodiments 861-877, wherein L″ is an optionally substituted bivalent C₁₋₁₀ aliphatic wherein one or more methylene units are optionally and independently replaced with —O—, —S—, -Cy-, —N(R′)—, —C(O)—, —C(O)N(R′)—, or —N(R′)C(O)O—.
[2065] 880. The agent of any one of Embodiments 861-877, wherein L″ is a bivalent C₁₋₆ aliphatic wherein one or more methylene units are optionally and independently replaced with —O—, —S—, —N(R′)—, —C(O)—, —C(O)N(R′)—, or —N(R′)C(O)O—.
[2066] 881. The agent of any one of Embodiments 861-877, wherein L″ is a bivalent C₁₋₆ aliphatic wherein one or more methylene units are optionally and independently replaced with —O—, —S—, —N(R′)—, —C(O)—, —C(O)N(R′)—, or —N(R′)C(O)O—.
[2067] 882. The agent of any one of Embodiments 861-877, wherein L″ is —(CH₂)ₙ— wherein n is 1, 2, 3, 4, 5, or 6.
[2068] 883. The agent of any one of the preceding Embodiments, wherein X¹⁶ is selected from Ala and dAla.
[2069] 884. The agent of any one of the preceding Embodiments, wherein X¹⁶ is selected from Cbg, Cpg, CyLeu, dLeu, dAla, Aib, Ala, Arg, Asn, dGln, dThr, Gln, Ile, Leu, nLeu, Phe, Ser, Thr, Trp, Tyr, and Val.
[2070] 885. The agent of any one of the preceding Embodiments, wherein X¹⁶ is selected from Cbg, Cpg, CyLeu, dLeu, and dAla.
[2071] 886. The agent of any one of the preceding Embodiments, wherein X¹⁶ is selected from Aib, Ala, Arg, Asn, dGln, dThr, Gln, Ile, Leu, nLeu, Phe, Ser, Thr, Trp, Tyr, and Val.
[2072] 887. The agent of any one of Embodiments 1-859, wherein p16 is 0.
[2073] 888. The agent of any one of the preceding Embodiments, wherein p17 is 1.
[2074] 889. The agent of any one of the preceding Embodiments, wherein X⁷ is —N(R^{a1})-L^{a1}-C(R^{a2})(R^{a3})-L^{a2}-C(O)
[2075] 890. The agent of Embodiment 889, wherein R^{a1} is —H.
[2076] 891. The agent of any one of Embodiments 889-890, wherein R^{a3} is —H.
[2077] 892. The agent of any one of Embodiments 889-890, wherein R^{a3} is optionally substituted C₁−6 aliphatic.
[2078] 893. The agent of any one of Embodiments 889-892, wherein L^{a1} is a covalent bond.
[2079] 894. The agent of any one of Embodiments 889-893, wherein L^{a2} is a covalent bond.
[2080] 895. The agent of any one of Embodiments 889-894, wherein R^{a2} is -L″-R.
[2081] 896. The agent of any one of Embodiments 889-894, wherein R^{a2} is -L″-Cy-R.
[2082] 897. The agent of any one of Embodiments 889-894, wherein R^{a2} is -L″—C(O)OR.
[2083] 898. The agent of any one of Embodiments 889-894, wherein R^{a2} is -L″—C(O)N(R′)₂.
[2084] 899. The agent of any one of Embodiments 889-894, wherein R^{a2} is -L″—C(O)N(R)₂.
[2085] 900. The agent of any one of Embodiments 895-899, wherein R is hydrogen or optionally substituted C₁₋₁₀ aliphatic.
[2086] 901. The agent of any one of Embodiments 895-899, wherein R is hydrogen.
[2087] 902. The agent of any one of Embodiments 895-899, wherein R is optionally substituted C₁₋₁₀ aliphatic.
[2088] 903. The agent of any one of Embodiments 895-899, wherein R is C₁₋₁₀ aliphatic.
[2089] 904. The agent of any one of Embodiments 895-899, wherein R is C₁₋₁₀ alkyl.
[2090] 905. The agent of any one of Embodiments 889-894, wherein R^{a2} is -L″—OH.
[2091] 906. The agent of any one of Embodiments 889-905, wherein L″ is a covalent bond or an optionally substituted bivalent C₁₋₁₀ aliphatic wherein one or more methylene units are optionally and independently replaced with —O—, —S—, -Cy-, —N(R′)—, —C(O)—, —C(O)N(R′)—, or —N(R′)C(O)O—.
[2092] 907. The agent of any one of Embodiments 889-905, wherein L″ is an optionally substituted bivalent C₁₋₁₀ aliphatic wherein one or more methylene units are optionally and independently replaced with —O—, —S—, -Cy-, —N(R′)—, —C(O)—, —C(O)N(R′)—, or —N(R′)C(O)O—.
[2093] 908. The agent of any one of Embodiments 889-905, wherein L″ is a bivalent C₁₋₆ aliphatic wherein one or more methylene units are optionally and independently replaced with —O—, —S—, —N(R′)—, —C(O)—, —C(O)N(R′)—, or —N(R′)C(O)O—.
[2094] 909. The agent of any one of Embodiments 889-905, wherein L″ is a bivalent C₁₋₆ aliphatic wherein one or more methylene units are optionally and independently replaced with —O—, —S—, —N(R′)—, —C(O)—, —C(O)N(R′)—, or —N(R′)C(O)O—.
[2095] 910. The agent of any one of Embodiments 889-905, wherein L″ is —(CH₂)ₙ— wherein n is 1, 2, 3, 4, 5, or 6.
[2096] 911. The agent of any one of the preceding Embodiments, wherein X⁷ is selected from Ala and dAla.
[2097] 912. The agent of any one of Embodiments 1-859, wherein p17 is 0.
[2098] 913. The agent of any one of the preceding Embodiments, wherein p18 is 1.
[2099] 914. The agent of any one of the preceding Embodiments, wherein X¹⁸ comprises a hydrophobic side chain.
[2100] 915. The agent of any one of the preceding Embodiments, wherein X¹s is selected from Aib, Ala, and Leu.
[2101] 916. The agent of any one of the preceding Embodiments, wherein p18 is 0.
[2102] 917. The agent of any one of the preceding Embodiments, wherein p19 is 1.
[2103] 918. The agent of any one of the preceding Embodiments, wherein X¹⁹ comprises a hydrophobic side chain.
[2104] 919. The agent of any one of the preceding Embodiments, wherein X¹⁹ is selected from Aib, Ala, and Leu.
[2105] 920. The agent of any one of the preceding Embodiments, wherein p19 is 0.
[2106] 921. The agent of any one of the preceding Embodiments, wherein p20 is 1.
[2107] 922. The agent of any one of the preceding Embodiments, wherein X²⁰ comprises a hydrophobic side chain.
[2108] 923. The agent of any one of the preceding Embodiments, wherein X²⁰ is selected from Aib, Ala, and Leu.
[2109] 924. The agent of any one of the preceding Embodiments, wherein p20 is 0.
[2110] 925. The agent of any one of the preceding Embodiments, wherein p21 is 1.
[2111] 926. The agent of any one of the preceding Embodiments, wherein X²¹ comprises a hydrophobic side chain.
[2112] 927. The agent of any one of the preceding Embodiments, wherein X²¹ is selected from Aib, Ala, and Leu.
[2113] 928. The agent of any one of the preceding Embodiments, wherein p21 is 0.
[2114] 929. The agent of any one of the preceding Embodiments, wherein p22 is 1.
[2115] 930. The agent of any one of the preceding Embodiments, wherein X²² comprises a hydrophobic side chain.
[2116] 931. The agent of any one of the preceding Embodiments, wherein X²² is selected from Aib, Ala, and Leu.
[2117] 932. The agent of any one of the preceding Embodiments, wherein p22 is 0.
[2118] 933. The agent of any one of the preceding Embodiments, wherein p23 is 1.
[2119] 934. The agent of any one of the preceding Embodiments, wherein X²³ comprises a hydrophobic side chain.
[2120] 935. The agent of any one of the preceding Embodiments, wherein X²³ is selected from Aib, Ala, and Leu.
[2121] 936. The agent of any one of the preceding Embodiments, wherein p23 is 0.
[2122] 937. The agent of any one of the preceding Embodiments, wherein each amino acid residue is independently —N(R^{a1})-L^{a1}-C(R^{a2})(R^{a3})-L^{a2}-C(O)—.
[2123] 938. The agent of Embodiment 937, wherein R^{a1} is —H.
[2124] 939. The agent of any one of Embodiments 1-937, wherein R^{a1} are taken together with R^{a2} or R^{a3} and their intervening atom(s) to form an optionally substituted 3-10 (e.g., 3, 4, 5, 6, 7, 8, 9, or 10) membered ring having in addition to the intervening atom(s) 0-5 heteroatoms.
[2125] 940. The agent of any one of Embodiments 1-937, wherein R^{a1} are taken together with R^{a2} or R^{a3} and their intervening atom(s) to form an optionally substituted 5-7 membered ring having in addition to the intervening atom(s) no heteroatoms.
[2126] 941. The agent of any one of the preceding Embodiments, wherein L^{a1} is a bivalent C₁₋₆ aliphatic wherein one or more methylene units are optionally and independently replaced with —O—, —S—, —N(R′)—, —C(O)—, -Cy-, —C(O)N(R′)—, or —N(R′)C(O)O—.
[2127] 942. The agent of any one of Embodiments 1-940, wherein L^{a1} is a covalent bond.
[2128] 943. The agent of any one of the preceding Embodiments, wherein R^{a2} is -L^{a}-R′ wherein, L^{a} is a covalent bond or an optionally substituted bivalent C₁₋₆ aliphatic wherein one or more methylene units are optionally and independently replaced with —O—, —S—, —N(R′)—, —C(O)—, -Cy-, —C(O)N(R′)—, or —N(R′)C(O)O—.
[2129] 944. The agent of any one of the preceding Embodiments, wherein R^{a3} is -L^{a}-R′ wherein, L^{a} is a covalent bond or an optionally substituted bivalent C₁₋₆ aliphatic wherein one or more methylene units are optionally and independently replaced with —O—, —S—, —N(R′)—, —C(O)—, -Cy-, —C(O)N(R′)—, or —N(R′)C(O)O—.
[2130] 945. The agent of any one of Embodiments 1-943, wherein R^{a3} is —H.
[2131] 946. The agent of any one of Embodiments 1-943, wherein R^{a3} is optionally substituted C₁₋₆ aliphatic.
[2132] 947. The agent of any one of the preceding Embodiments, wherein L^{a2} is a bivalent C₁₋₆ aliphatic wherein one or more methylene units are optionally and independently replaced with —O—, —S—, —N(R′)—, —C(O)—, -Cy-, —C(O)N(R′)—, or —N(R′)C(O)O—.
[2133] 948. The agent of any one of Embodiments 1-946, wherein L^{a2} is a covalent bond.
[2134] 949. The agent of any one of the preceding Embodiments, wherein the peptide comprises a hydrocarbon staple.
[2135] 950. The agent of any one of the preceding Embodiments, wherein the peptide comprises a non-hydrogen staple.
[2136] 951. The agent of any one of the preceding Embodiments, wherein the peptide comprises a staple whose chain comprises —N(R′)— or —O—C(O)—N(R′)—.
[2137] 952. The agent of any one of the preceding Embodiments, wherein the peptide has the structure of:

R^{N}—[X]ₚ-X¹X²X³X⁴X⁵X⁶X⁷X⁸X⁹X¹⁰X¹¹X¹²X¹³[X¹⁴]ₚ₁₄[X¹⁵]ₚ₁₅[X¹⁶]ₚ₁₆[X¹⁷]ₚ₁₇—[X]_{p′}-R^{C},
[2138] or a salt thereof, wherein:
   [2139] each X is independently an amino acid residue;
   [2140] each p and p′ is independently 0-10;
   [2141] R^{N} is independently a peptide, an amino protecting group or R′-L^{RN}-;
   [2142] R^{C} is independently a peptide, a carboxyl protecting group, -L^{RC}-R′, —O-L^{RC}-R′ or —N(R′)-L^{RC}-R′;
   [2143] each of L^{RN} and L^{RC} is independently L;
   [2144] each L is independently a covalent bond, or an optionally substituted, bivalent C₁-C₂₅ aliphatic or heteroaliphatic group having 1-10 heteroatoms, wherein one or more methylene units of the group are optionally and independently replaced with —C(R′)₂—, -Cy-, —O—, —S—, —S—S—, —N(R′)—, —C(O)—, —C(S)—, —C(NR′)—, —C(O)N(R′)—, —N(R′)C(O)N(R′)—, —N(R′)C(O)O—, —S(O)—, —S(O)₂—, —S(O)₂N(R′)—, —C(O)S—, or —C(O)O—;
   [2145] each -Cy- is independently an optionally substituted bivalent, 3-30 membered, monocyclic, bicyclic or polycyclic ring having 0-10 heteroatoms;
   [2146] each R′ is independently -L-R, —C(O)R, —CO₂R, or —SO₂R;
   [2147] each R is independently —H, or an optionally substituted group selected from C₁₋₃₀ aliphatic, C₁₋₃₀ heteroaliphatic having 1-10 heteroatoms, C₆₋₃₀ aryl, C₆₋₃₀ arylaliphatic, C₆₋₃₀ arylheteroaliphatic having 1-10 heteroatoms, 5-30 membered heteroaryl having 1-10 heteroatoms, and 3-30 membered heterocyclyl having 1-10 heteroatoms, or
   [2148] two R groups are optionally and independently taken together to form a covalent bond, or:
   [2149] two or more R groups on the same atom are optionally and independently taken together with the atom to form an optionally substituted, 3-30 membered, monocyclic, bicyclic or polycyclic ring having, in addition to the atom, 0-10 heteroatoms; or
   [2150] two or more R groups on two or more atoms are optionally and independently taken together with their intervening atom(s) to form an optionally substituted, 3-30 membered, monocyclic, bicyclic or polycyclic ring having, in addition to the intervening atom(s), 0-10 heteroatoms.
[2151] 953. The agent of any one of the preceding Embodiments, wherein p is 0.
[2152] 954. The agent of any one of the preceding Embodiments, wherein p′ is 0.
[2153] 955. The agent of any one of the preceding Embodiments, wherein R^{N} is —C(O)R.
[2154] 956. The agent of any one of the preceding Embodiments, wherein R^{N} is Ac.
[2155] 957. The agent of Embodiment 952, wherein R^{N} is AzAc (N₃—CH₂—C(O)—).
[2156] 958. The agent of Embodiment 952, wherein R^{N} is 2PyPrpc

[chemical structure]

[2157] 959. The agent of Embodiment 952, wherein R^{N} is MeOPr (CH₃OCH₂CH₂C(O)—).
[2158] 960. The agent of Embodiment 952, wherein R^{N} is MeSO₂ (—SO₂CH₃).
[2159] 961. The agent of Embodiment 952, wherein R^{N} is mPEG2 (CH₃OCH₂CH₂OCH₂CH₂C(O)—).
[2160] 962. The agent of Embodiment 952, wherein R^{N} is Nic

[chemical structure]

[2161] 963. The agent of Embodiment 952, wherein R^{N} is Oct (CH₃(CH₂)₆C(O)—).
[2162] 964. The agent of Embodiment 952, wherein R^{N} is Pic

[chemical structure]

[2163] 965. The agent of any one of the preceding Embodiments, wherein R^{C} is —N(R′)₂.
[2164] 966. The agent of any one of the preceding Embodiments, wherein R^{C} is —N(R)₂.
[2165] 967. The agent of Embodiment 966, wherein R^{C} is —NH₂.
[2166] 968. The agent of Embodiment 966, wherein R^{C} is —NHEt.
[2167] 969. The agent of Embodiment 966, wherein R^{C} is —NHBn.
[2168] 970. The agent of Embodiment 966, wherein R^{C} is —NHCyHe

[chemical structure]

[2169] 971. The agent of Embodiment 966, wherein R^{C} is —NHCyPr

[chemical structure]

[2170] 972. The agent of Embodiment 966, wherein R^{C} is −6AmHex, wherein one amino group of −6AmHex is bonded to the last —C(O)— of the peptide backbone (R^{C} is —NH—(CH₂)₆—NH₂).
[2171] 973. The agent of Embodiment 966, wherein R^{C} is −6AZHex, wherein the amino group of −6AzHex is bonded to the last —C(O)— of the peptide backbone (R^{C} is —NH—(CH₂)₆—N₃).
[2172] 974. The agent of Embodiment 966, wherein R^{C} is -Alaol, wherein the amino group of -Alaol is bonded to the last —C(O)— of the peptide backbone (R^{C} is

[chemical structure]

[2173] 975. The agent of Embodiment 966, wherein R^{C} is -Leuol, wherein the amino group of -Leuol is bonded to the last —C(O)— of the peptide backbone (R^{C} is

[chemical structure]

[2174] 976. The agent of Embodiment 966, wherein R^{C} is -Pheol, wherein the amino group of -Pheol is bonded to the last —C(O)— of the peptide backbone (R^{C} is

[chemical structure]

[2175] 977. The agent of Embodiment 966, wherein R^{C} is -Prool, wherein the amino group of -Prool is bonded to the last —C(O)— of the peptide backbone (R^{C} is

[chemical structure]

[2176] 978. The agent of Embodiment 966, wherein R^{C} is -Throl, wherein the amino group of -Throl is bonded to the last —C(O)— of the peptide backbone (R^{C} is

[chemical structure]

[2177] 979. The agent of any one of Embodiments 1-964, wherein R^{C} is —OH.
[2178] 980. The agent of any one of the preceding Embodiments, wherein the peptide forms a structure that comprises a helix.
[2179] 981. The agent of any one of the preceding Embodiments, wherein the peptide binds to beta-catenin.
[2180] 982. The agent of any one of the preceding Embodiments, wherein the peptide binds to beta-catenin with a EC50 of no more than about 2000 nM, or no more than about 1500 nM, or no more than about 1000 nM, or no more than about 500 nM, or no more than about 300 nM, or no more than about 200 nM, or no more than about 100 nM, or no more than about 75 nM, or no more than about 50 nM, or no more than about 25 nM, or no more than about 10 nM as measured by fluorescence polarization.
[2181] 983. The agent of any one of the preceding Embodiments, wherein the peptide can compete with TCF7, LEF1, TCF7L1, TCF7L2, Axin1, Axin2, or APC, or a fragment thereof, for beta-catenin binding.
[2182] 984. The agent of any one of the preceding Embodiments, wherein the peptide binds to a polypeptide whose sequence is or comprising SEQ ID NO: 2, or a fragment thereof:

(SEQ ID NO: 2)
SVLFYAITTLHNLLLHQEGAKMAVRLAGGLQKMVALLNKTNVKFLAITTD
CLQILAYGNQESKLIILASGGPQALVNIMRTYTYEKLLWTTSRVLKVLSV
CSSNKPAIVEAGGMQALGLHLTDPSQRLVQNCLWTLRNLSDAATKQEGME
GLLGTLVQLLGSDDINVVTCAAGILSNLTCNNYKNKMMVCQVGGIEALVR
T.

[2183] 985. The agent of any one of the preceding Embodiments, wherein the peptide binds to beta-catenin and interacts with one or more residues that are or correspond to at least two, or at least three, or at least four, or at least five, or at least six, or at least seven, or at least eight or at least nine, or at least ten, or at least eleven, or at least twelve, or at least thirteen, or at least fourteen, or at least fifteen, or at least sixteen, or at least seventeen, or at least eighteen, or at least nineteen, or at least twenty of the following amino acid residues in SEQ ID NO: 1 at the indicated positions: A305, Y306, G307, N308, Q309, K312, R342, K345, V346, V349, Q375, R376, Q379, N380, L382, W383, R386, N387, D413, N415, V416, T418, and C419.
[2184] 986. The agent of any one of the preceding Embodiments, wherein the peptide binds to beta-catenin and interacts with one or more residues that are or correspond to at least two, or at least three, or at least four, or at least five, or at least six, or at least seven, or at least eight or at least nine, or at least ten, or at least eleven, or at least twelve, or at least thirteen, or at least fourteen, or at least fifteen, or at least sixteen, or at least seventeen, or at least eighteen, or at least nineteen, or at least twenty of the following amino acid residues in SEQ ID NO: 1 at the indicated positions: A305, Y306, G307, N308, Q309, K312, R342, K345, V346, V349, Q375, Q379, N380, L382, W383, R386, N387, D413, N415, V416, T418, and C419.
[2185] 987. The agent of any one of the preceding Embodiments, wherein the peptide binds to beta-catenin and interacts with one or more residues that are or correspond to at least two, or at least three, or at least four, or at least five, or at least six, or at least seven, or at least eight or at least nine, or at least ten, or at least eleven, or at least twelve, or at least thirteen, or at least fourteen, or at least fifteen, or at least sixteen, or at least seventeen, or at least eighteen, or at least nineteen, or at least twenty of the following amino acid residues in SEQ ID NO: 1 at the indicated positions: A305, Y306, G307, N308, Q309, K312, K345, V346, V349, Q379, N380, L382, W383, R386, N387, D413, N415, V416, T418, and C419.
[2186] 988. The agent of any one of the preceding Embodiments, wherein the peptide binds to beta-catenin and interacts with one or more residues that are or correspond to at least two, or at least three, or at least four, or at least five, or at least six, or at least seven, or at least eight or at least nine, or at least ten, or at least eleven, or at least twelve, or at least thirteen, or at least fourteen, or at least fifteen, or at least sixteen, or at least seventeen, or at least eighteen, or at least nineteen, or at least twenty of the following amino acid residues in SEQ ID NO: 1 at the indicated positions: G307, K312, K345, W383, N387, D413, and N415.
[2187] 989. The agent of any one of the preceding Embodiments, wherein the agent interacts with G307 of beta-catenin or an amino acid residue corresponding thereto.
[2188] 990. The agent of any one of the preceding Embodiments, wherein the agent interacts with K312 of beta-catenin or an amino acid residue corresponding thereto.
[2189] 991. The agent of any one of the preceding Embodiments, wherein the agent interacts with K345 of beta-catenin or an amino acid residue corresponding thereto.
[2190] 992. The agent of any one of the preceding Embodiments, wherein the agent interacts with W383 of beta-catenin or an amino acid residue corresponding thereto.
[2191] 993. The agent of any one of the preceding Embodiments, wherein the agent interacts with N387 of beta-catenin or an amino acid residue corresponding thereto.
[2192] 994. The agent of any one of the preceding Embodiments, wherein the agent interacts with D413 of beta-catenin or an amino acid residue corresponding thereto.
[2193] 995. The agent of any one of the preceding Embodiments, wherein the agent interacts with N415 of beta-catenin or an amino acid residue corresponding thereto.
[2194] 996. The agent of any one of the preceding Embodiments, wherein the agent binds to beta-catenin at a site that is not an axin binding site.
[2195] 997. The agent of any one of the preceding Embodiments, wherein the agent binds to beta-catenin at a site that is not a Bcl9 binding site.
[2196] 998. The agent of any one of the preceding Embodiments, wherein the agent binds to beta-catenin at a site that is not a TCF binding site.
[2197] 999. The agent of any one of the preceding Embodiments, wherein the agent is the peptide.
[2198] 1000. An agent having a structure selected from Table E3 or a salt thereof.
[2199] 1001. An agent has the structure of

[chemical structure]

or a salt thereof.
[2200] 1002. An agent has the structure of

[chemical structure]

or a salt thereof.
[2201] 1003. An agent has the structure of

[chemical structure]

or a salt thereof.
[2202] 1004. The agent of any one of Embodiments 1001-1003, wherein a double bond of a staple bonded to the first amino acid from the N-terminus is E.
[2203] 1005. The agent of any one of Embodiments 1001-1003, wherein a double bond of a staple bonded to the first amino acid from the N-terminus is Z.
[2204] 1006. The agent of any one of Embodiments 1001-1005, wherein a double bond of a staple bonded to the 11th amino acid from the N-terminus is E.
[2205] 1007. The agent of any one of Embodiments 1001-1005, wherein a double bond of a staple bonded to the 11^{th} amino acid from the N-terminus is Z.
[2206] 1008. A compound having the structure of formula PA:

N(R^{PA})(R^{a1})-L^{a1}-C(R^{a2})(R^{a3})-L^{a2}-C(O)R^{C} PA
[2207] or a salt thereof, wherein:
   [2208] R^{PA} is —H or an amino protecting group;
   [2209] each of R^{a1} and R^{a3} is independently -L^{a}-R′;
   [2210] R^{a2} is -L^{aa}-C(O)R^{PS};
   [2211] each of L^{a}, L^{a1} and L^{a2} is independently L;
   [2212] —C(O)R^{PS} is optionally protected or activated —COOH;
   [2213] —C(O)R^{C} is optionally protected or activated —COOH;
   [2214] each L is independently a covalent bond, or an optionally substituted, bivalent C₁-C₂₅ aliphatic or heteroaliphatic group having 1-10 heteroatoms wherein one or more methylene units of the group are optionally and independently replaced with —C(R′)₂—, -Cy-, —O—, —S—, —S—S—, —N(R′)—, —C(O)—, —C(S)—, —C(NR′)—, —C(O)N(R′)—, —N(R′)C(O)N(R′)—, —N(R′)C(O)O—, —S(O)—, —S(O)₂—, —S(O)₂N(R′)—, —C(O)S—, or —C(O)O—;
   [2215] each -Cy- is independently an optionally substituted bivalent, 3-30 membered, monocyclic, bicyclic or polycyclic ring having 0-10 heteroatoms;
   [2216] each R′ is independently —R, —C(O)R, —CO₂R, or —SO₂R; and
   [2217] each R is independently —H, or an optionally substituted group selected from C₁₋₃₀ aliphatic, C₁₋₃₀ heteroaliphatic having 1-10 heteroatoms, C₆₋₃₀ aryl, C₆₋₃₀ arylaliphatic, C₆₋₃₀ arylheteroaliphatic having 1-10 heteroatoms, 5-30 membered heteroaryl having 1-10 heteroatoms, and 3-30 membered heterocyclyl having 1-10 heteroatoms, or
   [2218] two R groups are optionally and independently taken together to form a covalent bond, or:
   [2219] two or more R groups on the same atom are optionally and independently taken together with the atom to form an optionally substituted, 3-30 membered, monocyclic, bicyclic or polycyclic ring having, in addition to the atom, 0-10 heteroatoms; or
   [2220] two or more R groups on two or more atoms are optionally and independently taken together with their intervening atom(s) to form an optionally substituted, 3-30 membered, monocyclic, bicyclic or polycyclic ring having, in addition to the intervening atom(s), 0-10 heteroatoms.
[2221] 1009. The compound of Embodiment 1008, wherein R^{a2} is -L^{aa}-C(O)R^{PS}, wherein L^{aa} is L and L^{aa} comprises —N(R′)— or -Cy-.
[2222] 1010. The compound of any one of the preceding Embodiments, wherein L^{a1} is a covalent bond.
[2223] 1011. The compound of any one of the preceding Embodiments, wherein L^{a2} is a covalent bond.
[2224] 1012. The compound of any one of the preceding Embodiments, wherein L^{aa} is an optionally substituted, bivalent C₁-C₂₅ aliphatic or heteroaliphatic group having 1-10 heteroatoms wherein one or more methylene units of the group are optionally and independently replaced with —C(R′)₂—, -Cy-, —O—, —S—, —S—S—, —N(R′)—, —C(O)—, —C(S)—, —C(NR′)—, —C(O)N(R′)—, —N(R′)C(O)N(R′)—, —N(R′)C(O)O—, —S(O)—, —S(O)₂—, —S(O)₂N(R′)—, —C(O)S—, or —C(O)O—, wherein at least one methylene unit is replaced with -Cy-.
[2225] 1013. The compound of any one of the preceding Embodiments, wherein L^{aa} is -L^{am1}-Cy-L^{am2}-, wherein each of L^{am1}and L^{am2} is independently L^{am}, wherein each L^{am} is independently a covalent bond, or an optionally substituted, bivalent C₁-C₁₀ aliphatic group wherein one or more methylene units of the aliphatic group are optionally and independently replaced with —C(R′)₂—, -Cy-, —O—, —S—, —S—S—, —N(R′)—, —C(O)—, —C(S)—, —C(NR′)—, —C(O)N(R′)—, —N(R′)C(O)N(R′)—, —N(R′)C(O)O—, —S(O)—, —S(O)₂—, —S(O)₂N(R′)—, —C(O)S—, or —C(O)O—.
[2226] 1014. The compound of any one of the preceding Embodiments, wherein -L^{am2}- is bonded to —C(O)R^{PS}
[2227] 1015. The compound of any one of the preceding Embodiments, wherein L^{am2} is a covalent bond.
[2228] 1016. The compound of any one of the preceding Embodiments, wherein -Cy- is an optionally substituted 4-7 membered ring having 0-3 heteroatoms.
[2229] 1017. The compound of any one of the preceding Embodiments, wherein -Cy- is an optionally substituted 6-10 membered aryl ring or is an optionally substituted 5-10 membered heteroaryl ring having 1-5 heteroatoms.
[2230] 1018. The compound of any one of the preceding Embodiments, wherein -Cy- is an optionally substituted phenyl ring.
[2231] 1019. The compound of any one of the preceding Embodiments, wherein -Cy- is optionally substituted

[chemical structure]

[2232] 1020. The compound of any one of the preceding Embodiments, wherein -Cy- is

[chemical structure]

[2233] 1021. The compound of any one of Embodiments 1008-1015, wherein -Cy- is optionally substituted

[chemical structure]

[2234] 1022. The compound of any one of Embodiments 1008-1015, wherein -Cy- is

[chemical structure]

[2235] 1023. The compound of any one of Embodiments 1008-1015, wherein -Cy- is optionally substituted

[chemical structure]

[2236] 1024. The compound of any one of Embodiments 1008-1015, wherein -Cy- is

[chemical structure]

[2237] 1025. The compound of any one of Embodiments 1008-1017, wherein -Cy- is an optionally substituted 5-10 membered heteroaryl ring having 1-5 heteroatoms.
[2238] 1026. The compound of any one of Embodiments 1008-1017, wherein -Cy- is an optionally substituted 5-membered heteroaryl ring having 1-5 heteroatoms.
[2239] 1027. The compound of any one of Embodiments 1008-1017, wherein -Cy- is optionally substituted

[chemical structure]

[2240] 1028. The compound of any one of Embodiments 1008-1017, wherein -Cy- is

[chemical structure]

[2241] 1029. The compound of any one of the preceding Embodiments, wherein L^{aa} comprises —N(R′)—.
[2242] 1030. The compound of Embodiment 1029, wherein L^{aa} is -L^{am1}-(NR′)-L^{am2}-, wherein each of L^{am1} and L^{am2} is independently L^{am}, wherein each L^{am} is independently a covalent bond, or an optionally substituted, bivalent C₁-C₁₀ aliphatic group wherein one or more methylene units of the aliphatic group are optionally and independently replaced with —C(R′)₂—, -Cy-, —O—, —S—, —S—S—, —N(R′)—, —C(O)—, —C(S)—, —C(NR′)—, —C(O)N(R′)—, —N(R′)C(O)N(R′)—, —N(R′)C(O)O—, —S(O)—, —S(O)₂—, —S(O)₂N(R′)—, —C(O)S—, or —C(O)O—.
[2243] 1031. The compound of any one of Embodiments 1029-1030, wherein R′ of the —N(R′)— is taken together with R^{a3} and their intervening atoms to form an optionally substituted 3-10 membered ring having 0-5 heteroatoms in addition to the intervening atoms.
[2244] 1032. The compound of any one of Embodiments 1029-1031, wherein —N(R′)— is bonded to two carbon atoms which two carbon atoms do not form any double bonds with heteroatoms.
[2245] 1033. The compound of any one of Embodiments 1029-1032, wherein -L^{am2}- is bonded to —C(O)R^{PS}.
[2246] 1034. The compound of any one of Embodiments 1029-1033, wherein L^{am1} is optionally substituted C₁₋₄ alkylene.
[2247] 1035. The compound of any one of Embodiments 1029-1033, wherein L^{am1} is optionally substituted —(CH₂)m-, wherein m is 1, 2, 3, or 4.
[2248] 1036. The compound of any one of Embodiments 1029-1033, wherein L^{am1} is optionally substituted —CH₂—.
[2249] 1037. The compound of any one of Embodiments 1029-1033, wherein L^{am1} is —CH₂—.
[2250] 1038. The compound of any one of Embodiments 1029-1037, wherein L^{am2} is optionally substituted linear C₁₋₂ alkylene.
[2251] 1039. The compound of any one of Embodiments 1029-1037, wherein L^{am2} is —[C(R′)₂]n, wherein n is 1 or 2.
[2252] 1040. The compound of any one of Embodiments 1029-1037, wherein L^{am2} is —[CHR′]n, wherein n is 1 or 2.
[2253] 1041. The compound of any one of Embodiments 1039-1040, wherein each R′ is independently —H or optionally substituted C₁₋₆ alkyl.
[2254] 1042. The compound of any one of Embodiments 1029-1037, wherein L^{am2} is optionally substituted —CH₂—.
[2255] 1043. The compound of any one of Embodiments 1029-1042, wherein L^{am2} is —CH₂—.
[2256] 1044. The compound of any one of Embodiments 1029-1043, wherein L^{aa} comprises —N(R′)—, wherein R′ of the —N(R′)— is —R^{NR}, wherein R^{NR} is R.
[2257] 1045. The compound of any one of Embodiments 1029-1043, wherein L^{aa} comprises —N(R′)—, wherein R′ of the —N(R′)— is —CH₂—R^{NR}, wherein R^{NR} is R.
[2258] 1046. The compound of any one of Embodiments 1029-1043, wherein L^{aa} comprises —N(R′)—, wherein R′ of the —N(R′)— is —C(O)R^{NR}, wherein R^{NR} is R.
[2259] 1047. The compound of any one of Embodiments 1029-1043, wherein L^{aa} comprises —N(R′)—, wherein R′ of the —N(R′)— is —SO₂R^{NR}, wherein R^{RN} is R.
[2260] 1048. The compound of any one of Embodiments 1044-1047, wherein R^{NR} is optionally substituted C₁₋₆ aliphatic or heteroaliphatic having 1-4 heteroatoms.
[2261] 1049. The compound of any one of Embodiments 1044-1048, wherein R^{NR} is C₁₋₇ alkyl or heteroalkyl having 1-4 heteroatoms, wherein the alkyl or heteroalkyl is optionally substituted with one or more groups independently selected from halogen, a C₅₋₆ aromatic ring having 0-4 heteroatoms, and an optionally substituted 3-10 membered cycloalkyl or heteroalkyl ring having 1-4 heteroatoms.
[2262] 1050. The compound of any one of Embodiments 1044-1049, wherein R^{NR} is —CF₃.
[2263] 1051. The compound of any one of Embodiments 1044-1048, wherein L^{am2} is or comprises —C(R′)₂— wherein the R′ group and R′ in —N(R′)— of L^{aa} are taken together with their intervening atom(s) to form an optionally substituted, 3-30 membered, monocyclic, bicyclic or polycyclic ring having, in addition to the intervening atom(s), 0-10 heteroatoms.
[2264] 1052. The compound of any one of Embodiments 1008-1012, wherein L^{aa} is optionally substituted C₁₋₄ alkylene.
[2265] 1053. The compound of Embodiment 1052, wherein L^{aa} is optionally substituted —CH₂—CH₂—.
[2266] 1054. The compound of Embodiment 1052, wherein L^{aa} is optionally substituted —CH₂—.
[2267] 1055. The compound of Embodiment 1008, having the structure of:

[chemical structure]

[2268] or a salt thereof, wherein:
   [2269] each of m and n is independently 1, 2, 3, or 4;
   [2270] L^{RN} is L;
   [2271] R^{RN} is R; and
   [2272] R^{a5} is R′.
[2273] 1056. The compound of Embodiment 1055, wherein m is 1.
[2274] 1057. The compound of any one of Embodiments 1055-1056, wherein L^{RN} is —CH₂—, —CO—, or —SO₂—.
[2275] 1058. The compound of any one of Embodiments 1055-1056, wherein L^{RN} is —CH₂—.
[2276] 1059. The compound of any one of Embodiments 1055-1058, wherein R^{NR} is C₁₋₇ alkyl or heteroalkyl having 1-4 heteroatoms, wherein the alkyl or heteroalkyl is optionally substituted with one or more groups independently selected from halogen, a C₅₋₆ aromatic ring having 0-4 heteroatoms, and an optionally substituted 3-10 membered cycloalkyl or heteroalkyl ring having 1-4 heteroatoms.
[2277] 1060. The compound of any one of Embodiments 1055-1059, wherein one or more R^{a5} are independently —H.
[2278] 1061. The compound of any one of Embodiments 1055-1060, wherein one or more R^{a5} are independently optionally substituted C₁₋₆ alkyl.
[2279] 1062. The compound of any one of Embodiments 1055-1060, wherein -L^{RN}-R^{RN} is R, and is taken together with a R^{a5} and their intervening atom(s) to form an optionally substituted, 3-30 membered, monocyclic, bicyclic or polycyclic ring having, in addition to the intervening atom(s), 0-10 heteroatoms.
[2280] 1063. The compound of Embodiment 1058, wherein R^{RN} is methyl.
[2281] 1064. The compound of Embodiment 1058, wherein R^{RN} is —CF₃.
[2282] 1065. The compound of any one of the preceding Embodiments, wherein R^{a1} is —H.
[2283] 1066. The compound of any one of Embodiments 1008-1051, wherein R^{a1} is optionally substituted C₁₋₆ alkyl.
[2284] 1067. The compound of any one of the preceding Embodiments, wherein —C(O)R^{PC} is a protected carboxylic acid group.
[2285] 1068. The compound of any one of Embodiments 1008-1066, wherein —C(O)R^{PC} is an activated carboxylic acid group.
[2286] 1069. The compound of any one of Embodiments 1008-1066, wherein —C(O)R^{PC} is —C(O)OR′.
[2287] 1070. The compound of Embodiment 1069, wherein R′ is —H.
[2288] 1071. The compound of Embodiment 1069, wherein R′ is pentafluorophenyl.
[2289] 1072. The compound of Embodiment 1069, wherein R′ is

[chemical structure]

[2290] 1073. The compound of any one of the preceding Embodiments, wherein —C(O)R^{PS} is —C(O)OR′.
[2291] 1074. The compound of Embodiment 1073, wherein R′ is —H.
[2292] 1075. The compound of Embodiment 1073, wherein R′ is optionally substituted C₁₋₆ aliphatic.
[2293] 1076. The compound of Embodiment 1073, wherein R′ is t-butyl.
[2294] 1077. The compound of Embodiment 1073, wherein R′ is benzyl.
[2295] 1078. The compound of Embodiment 1073, wherein R′ is allyl.
[2296] 1079. The compound of Embodiment 1008, wherein the compound has the structure of

[chemical structure]

or a salt thereof, wherein Ring A is an optionally substituted 3-7 membered saturated, partially unsaturated or aromatic ring.
[2297] 1080. The compound of Embodiment 1008, wherein the compound has the structure of

[chemical structure]

or a salt thereof, wherein Ring A is an optionally substituted 3-7 membered saturated, partially unsaturated or aromatic ring.
[2298] 1081. The compound of any one of Embodiment 1079 or 1080, wherein —C(O)OtBu is bonded to a chiral carbon atom having a R configuration.
[2299] 1082. The compound of any one of Embodiment 1079 or 1080, wherein —C(O)OtBu is bonded to a chiral carbon atom having a S configuration.
[2300] 1083. The compound of Embodiment 1008, wherein the compound has the structure of

[chemical structure]

or a salt thereof, wherein:
   [2301] Ring A is an optionally substituted 3-10 membered ring;
   [2302] n is 0, 1, or 2; and
   [2303] m is 0, 1, 2, or 3.
[2304] 1084. The compound of Embodiment 1008, wherein the compound has the structure of

[chemical structure]

or a salt thereof, wherein:
   [2305] Ring A is an optionally substituted 3-10 membered ring;
   [2306] n is 0, 1, or 2; and
   [2307] m is 0, 1, 2, or 3.
[2308] 1085. The compound of any one of Embodiments 1083-1084, wherein Ring A is an optionally substituted 4-10 membered ring.
[2309] 1086. The compound of any one of Embodiments 1083-1085, wherein n is 1.
[2310] 1087. The compound of any one of Embodiments 1083-1086, wherein Ring A is bonded to —(CH₂)ₙ— at a chiral carbon which is R.
[2311] 1088. The compound of any one of Embodiments 1083-1086, wherein Ring A is bonded to —(CH₂)ₙ— at a chiral carbon which is S.
[2312] 1089. The compound of Embodiment 1008, wherein the compound has the structure of

[chemical structure]

or a salt thereof, wherein:
   [2313] Ring A is an optionally substituted 3-10 membered ring;
   [2314] n is 0, 1, or 2; and
   [2315] m is 0, 1, 2, or 3.
[2316] 1090. The compound of Embodiment 1008, wherein the compound has the structure of

[chemical structure]

or a salt thereof, wherein:
   [2317] Ring A is an optionally substituted 3-10 membered ring;
   [2318] n is 0, 1, or 2; and
   [2319] m is 0, 1, 2, or 3.
[2320] 1091. The compound of Embodiment 1008, wherein the compound has the structure of

[chemical structure]

or a salt thereof, wherein:
   [2321] Ring A is an optionally substituted 3-10 membered ring; and
   [2322] n is 0, 1, or 2.
[2323] 1092. The compound of any one of Embodiments 1083-1091, wherein n is 1.
[2324] 1093. The compound of any one of Embodiments 1083-1092, wherein m is 0.
[2325] 1094. The compound of any one of Embodiments 1083-1092, wherein m is 1, 2, or 3.
[2326] 1095. The compound of any one of Embodiments 1083-1092, wherein m is 1.
[2327] 1096. The compound of any one of Embodiments 1083-1095, wherein Ring A is or comprises an optionally substituted saturated monocyclic ring.
[2328] 1097. The compound of any one of Embodiments 1083-1096, wherein Ring A is or comprises an optionally substituted partially unsaturated monocyclic ring.
[2329] 1098. The compound of any one of Embodiments 1083-1097, wherein Ring A is or comprises an optionally substituted aromatic monocyclic ring.
[2330] 1099. The compound of any one of Embodiments 1089-1095, wherein Ring A is optionally substituted phenyl.
[2331] 1100. The compound of any one of Embodiments 1083-1095, wherein Ring A is optionally substituted 5−6 membered heteroaryl having 1-3 heteroatoms.
[2332] 1101. The compound of any one of Embodiments 1083-1095, wherein Ring A is optionally substituted 5−6 membered heteroaryl having 1-3 heteroatoms, wherein at least one heteroatom is nitrogen.
[2333] 1102. The compound of Embodiment 1101, wherein Ring A is an optionally substituted triazole ring.
[2334] 1103. The compound of any one of Embodiments 1083-1095, wherein Ring A is an optionally substituted 8-10 membered bicyclic ring having 1−6 heteroatoms.
[2335] 1104. The compound of any one of Embodiments 1083-1086, wherein Ring A is an optionally substituted 8-10 membered bicyclic aromatic ring having 1−6 heteroatoms, wherein each monocyclic unit is independently an optionally 5−6 membered aromatic ring having 0-3 heteroatoms.
[2336] 1105. The compound of any one of Embodiments 1100-1104, wherein Ring A is bonded to —(CH₂)ₙ— at a carbon atom.
[2337] 1106. The compound of any one of Embodiments 1100-1104, wherein Ring A is bonded to —(CH₂)ₙ— at a nitrogen atom.
[2338] 1107. The compound of any one of the preceding Embodiments, wherein Ring A or -Cy- in L^{aa} is optionally substituted, and each substitute is independently selected from halogen, —R, —CF₃, —N(R)₂, —CN, and —OR, wherein each R is independently C₁₋₆ aliphatic optionally substituted with one or more —F.
[2339] 1108. The compound of any one of the preceding Embodiments, wherein Ring A or -Cy- in L^{aa} is optionally substituted, and each substitute is independently selected from halogen, C₁₋₅ linear, branched or cyclic alkyl, —OR wherein R is C₁₋₄ linear, branched or cyclic alkyl, fluorinated alkyl, —N(R)₂ wherein each R is independently C₁₋₆ linear, branched or cyclic alkyl, or —CN.
[2340] 1109. The compound of any one of the preceding Embodiments, wherein R^{a3} is —H or optionally substituted C₁₋₆ aliphatic.
[2341] 1110. The compound of any one of the preceding Embodiments, wherein R^{a3} is —H.
[2342] 1111. The compound of any one of Embodiments 1008-1109, wherein R^{a3} is methyl.
[2343] 1112. A compound having the structure of:

[chemical structure]

[2344] or a salt thereof, wherein:
   [2345] R^{PA} is —H or an amino protecting group;
   [2346] —C(O)R^{PS} is optionally protected or activated —COOH; and
   [2347] —C(O)R^{C} is optionally protected or activated —COOH.
[2348] 1113. A compound having the structure of:

[chemical structure]

[2349] or a salt thereof, wherein:
   [2350] R^{PA} is —H or an amino protecting group;
   [2351] —C(O)R^{PS} is optionally protected or activated —COOH; and
   [2352] —C(O)R^{C} is optionally protected or activated —COOH.
[2353] 1114. The compound of any one of the preceding Embodiments, wherein R^{PA} is an amino protecting group suitable for peptide synthesis.
[2354] 1115. The compound of any one of the preceding Embodiments, wherein R^{PA} is —C(O)—O—R.
[2355] 1116. The compound of Embodiment 1115, wherein R is optionally substituted

[chemical structure]

[2356] 1117. The compound of any one of the preceding Embodiments, wherein R^{PA} is -Fmoc.
[2357] 1118. The compound of any one of the preceding Embodiments, wherein R^{PA} is —Cbz.
[2358] 1119. The compound of any one of the preceding Embodiments, wherein R^{PA} is -Boc.
[2359] 1120. The compound of any one of the preceding Embodiments, wherein R^{PS} is a protecting group orthogonal to R^{PA}.
[2360] 1121. The compound of any one of the preceding Embodiments, wherein R^{PS} is a protecting group orthogonal to R^{PC}.
[2361] 1122. The compound of any one of the preceding Embodiments, wherein R^{PS} is compatible with peptide synthesis.
[2362] 1123. The compound of any one of the preceding Embodiments, wherein —C(O)R^{PS} is —C(O)OR′.
[2363] 1124. The compound of Embodiment 1073, wherein R′ is —H.
[2364] 1125. The compound of Embodiment 1073, wherein R′ is optionally substituted C₁₋₆ aliphatic.
[2365] 1126. The compound of Embodiment 1073, wherein R′ is t-butyl.
[2366] 1127. The compound of Embodiment 1073, wherein R′ is benzyl.
[2367] 1128. The compound of Embodiment 1073, wherein R′ is allyl.
[2368] 1129. The compound of any one of Embodiments 1008-1122, wherein —C(O)R^{PS} is —C(O)S-L-R′.
[2369] 1130. The compound of Embodiment 1129, wherein L is optionally substituted —CH₂—.
[2370] 1131. The compound of Embodiment 1129, wherein L is —CH₂—.
[2371] 1132. The compound of any one of Embodiments 1129-1131, wherein R′ is optionally substituted phenyl.
[2372] 1133. The compound of any one of Embodiments 1129-1131, wherein R′ is 2, 4, 6-trimethoxyphenyl.
[2373] 1134. The compound of Embodiment 1129, wherein R^{PS} is —SH.
[2374] 1135. The compound of any one of the preceding Embodiments, wherein —C(O)R^{PC} is a protected carboxylic acid group.
[2375] 1136. The compound of any one of Embodiments 1008-1133, wherein —C(O)R^{PC} is an activated carboxylic acid group.
[2376] 1137. The compound of any one of Embodiments 1008-1133, wherein —C(O)R^{C} is —C(O)OR′.
[2377] 1138. The compound of Embodiment 1137, wherein R′ is —H.
[2378] 1139. The compound of Embodiment 1137, wherein R′ is pentafluorophenyl.
[2379] 1140. The compound of Embodiment 1137, wherein R′ is

[chemical structure]

[2380] 1141. The compound of any one of the preceding Embodiments, wherein each heteroatom is independently selected from oxygen, nitrogen, sulfur, phosphorus and silicon.
[2381] 1142. The compound of any one of the preceding Embodiments, wherein each heteroatom is independently selected from oxygen, nitrogen, and sulfur.
[2382] 1143. A compound, wherein the compound is

[chemical structure]

or a salt thereof.
[2383] 1144. A compound, wherein the compound is

[chemical structure]

or a salt thereof.
[2384] 1145. A compound, wherein the compound is

[chemical structure]

or a salt thereof.
[2385] 1146. A compound, wherein the compound is

[chemical structure]

or a salt thereof.
[2386] 1147. A compound, wherein the compound is

[chemical structure]

or a salt thereof.
[2387] 1148. A compound, wherein the compound is

[chemical structure]

or a salt thereof.
[2388] 1149. A compound, wherein the compound is

[chemical structure]

or a salt thereof.
[2389] 1150. A compound, wherein the compound is

[chemical structure]

or a salt thereof.
[2390] 1151. A compound, wherein the compound is

[chemical structure]

or a salt thereof.
[2391] 1152. A compound, wherein the compound is

[chemical structure]

or a salt thereof.
[2392] 1153. A compound, wherein the compound is

[chemical structure]

or a salt thereof.
[2393] 1154. A compound, wherein the compound is

[chemical structure]

or a salt thereof.
[2394] 1155. A compound, wherein the compound is

[chemical structure]

or a salt thereof.
[2395] 1156. A compound, wherein the compound is

[chemical structure]

or a salt thereof.
[2396] 1157. A compound, wherein the compound is

[chemical structure]

or a salt thereof.
[2397] 1158. A compound, wherein the compound is

[chemical structure]

or a salt thereof.
[2398] 1159. A compound, wherein the compound is

[chemical structure]

or a salt thereof.
[2399] 1160. A compound, wherein the compound is

[chemical structure]

or a salt thereof.
[2400] 1161. A compound, wherein the compound is

[chemical structure]

or a salt thereof.
[2401] 1162. A compound, wherein the compound is

[chemical structure]

or a salt thereof.
[2402] 1163. The compound of any one of the preceding Embodiments, wherein the compound has a purity of at least about 90%, 91%, 92%, 93%, 94%, 95%, 96%, 97%, 98%, or 99%.
[2403] 1164. A compound, comprising a residue of any one of the preceding Embodiments.
[2404] 1165. A compound, comprising a residue of Table A-IV.
[2405] 1166. A compound, comprising a residue having the structure of

[chemical structure]

or a salt form thereof.
[2406] 1167. A compound, comprising a residue having the structure of

[chemical structure]

or a salt form thereof.
[2407] 1168. A compound, comprising a residue having the structure of

[chemical structure]

or a salt form thereof.
[2408] 1169. A compound, comprising a residue having the structure of

[chemical structure]

or a salt form thereof.
[2409] 1170. A compound, comprising a residue having the structure of

[chemical structure]

or a salt form thereof.
[2410] 1171. A compound, comprising a residue having the structure of

[chemical structure]

or a salt form thereof.
[2411] 1172. A compound, comprising a residue having the structure of

[chemical structure]

or a salt form thereof.
[2412] 1173. A compound, comprising a residue having the structure of

[chemical structure]

or a salt form thereof.
[2413] 1174. A compound, comprising a residue having the structure of

[chemical structure]

or a salt form thereof.
[2414] 1175. A compound, comprising a residue having the structure of

[chemical structure]

or a salt form thereof
[2415] 1176. The compound of any one of Embodiments 1164-1175, wherein the compound is or comprise a peptide.
[2416] 1177. The compound of any one of Embodiments 1164-1175, wherein the compound is an agent of any one of the preceding Embodiments.
[2417] 1178. The compound of any one of Embodiments 1164-1175, wherein the compound is or comprise a stapled peptide.
[2418] 1179. A method for preparing a compound of any one of Embodiments 1164-1178, comprising utilization of a compound of any one of the Embodiments 1008-1163.
[2419] 1180. An agent, which agent comprises a residue of an amino acid of any one of the preceding Embodiments.
[2420] 1181. The agent of any one of Embodiments 1-999, wherein the agent comprises a residue of an amino acid of any one of the preceding Embodiments.
[2421] 1182. The agent of any one of the preceding Embodiments, wherein each olefin double bond in a staple is independently and optionally converted into a single bond.
[2422] 1183. The agent of any one of the preceding Embodiments, wherein each olefin double bond in a staple is converted into a single bond.
[2423] 1184. The agent of any one of the preceding Embodiments, wherein each olefin double bond is converted into a single bond.
[2424] 1185. The agent of any one of the preceding Embodiments, wherein each olefin double bond is independently and optionally converted into —CHR′—CHR′—, wherein each R is independently —H, —R, —OR, —OH, —N(R)₂, or —SR.
[2425] 1186. The agent of any one of the preceding Embodiments, wherein each olefin double bond is converted into —CHR′—CHR′—, wherein each R is independently —H, —R, —OR, —OH, —N(R)₂, or —SR.
[2426] 1187. The agent of any one of the preceding Embodiments, wherein each olefin double bond is independently and optionally converted into optionally substituted —CH₂—CH₂—.
[2427] 1188. The agent of any one of the preceding Embodiments, wherein each olefin double bond is converted into —CH₂—CH₂—.
[2428] 1189. A pharmaceutical composition, comprising or delivering an agent or amino acid of any one of the preceding Embodiments, and a pharmaceutically acceptable carrier.
[2429] 1190. A composition selected from Table E3.
[2430] 1191. A pharmaceutical composition, comprising or delivering one or more or all peptide agents in a composition selected from Table E3 and a pharmaceutically acceptable carrier.
[2431] 1192. A method for preparing an agent of any one of the preceding Embodiments, comprising incorporating a residue of an amino acid of any one of the preceding Embodiments.
[2432] 1193. A method for modulating beta-catenin interaction with a partner in a system, comprising contacting beta-catenin with an agent or composition of any one of the preceding Embodiments.
[2433] 1194. A method for modulating beta-catenin interaction with a partner in a system, comprising administering or delivering to the system an agent or composition of any one of the preceding Embodiments.
[2434] 1195. The method of nay one of Embodiments 1193-1194, wherein the partner is TCF7, LEF1, TCF7L1, TCF7L2, Axin1, Axin2, or APC.
[2435] 1196. A method for modulating a TCF-beta-catenin interaction in a system, comprising contacting beta-catenin with an agent or composition of any one of the preceding Embodiments.
[2436] 1197. A method for inhibiting beta-catenin dependent cell proliferation, comprising administering or delivering to the system an agent or composition of any one of the preceding Embodiments.
[2437] 1198. A method for modulating a TCF-beta-catenin interaction in a system, comprising administering or delivering to the system an agent or composition of any one of the preceding Embodiments.
[2438] 1199. The method of any one of Embodiments 1193-1198, wherein a system is an in vitro system.
[2439] 1200. The method of any one of Embodiments 1193-1198, wherein a system is or comprises a cell, tissue or organ.
[2440] 1201. The method of any one of Embodiments 1193-1198, wherein a system is a subject.
[2441] 1202. A method for treating or preventing a condition, disorder or disease associated with beta-catenin in a subject, comprising administering or delivering to the subject an effective amount of an agent or composition of any one of the preceding Embodiments.
[2442] 1203. A method for treating cancer in a subject, comprising administering or delivering to the subject an effective amount of an agent or composition of any one of the preceding Embodiments.
[2443] 1204. A method for treating or preventing a condition, disorder or disease associated with beta-catenin interaction with a partner in a subject, comprising administering or delivering to the subject an effective amount of an agent or composition of any one of the preceding Embodiments.
[2444] 1205. The method of Embodiment 1204, wherein the partner is TCF7, LEF1, TCF7L1, TCF7L2, Axin1, Axin2, or APC.
[2445] 1206. A method for treating or preventing a condition, disorder or disease associated with TCF-beta-catenin interaction in a subject, comprising administering or delivering to the subject an effective amount of an agent or composition of any one of the preceding Embodiments.
[2446] 1207. The method of any one of the preceding Embodiments, wherein the condition, disorder or disease is melanoma.
[2447] 1208. The method of any one of the preceding Embodiments, comprising administering or deliver to a subject a second therapeutic agent.
[2448] 1209. The method of any one of the preceding Embodiments, comprising administering or deliver to a subject a second therapy.
[2449] 1210. The method of Embodiment 1208, wherein a second therapeutic agent or therapy is administered prior to an agent of any one of the preceding Embodiments.
[2450] 1211. The method of Embodiment 1208, wherein a second therapeutic agent or therapy is administered about or no more than about 1, 2, 3, 4, 5, 6, or 7 days, or 1, 2, 3, or weeks, or 1, 2, 3, 4, 5, or 6 months, prior to an agent of any one of the preceding Embodiments.
[2451] 1212. The method of Embodiment 1208, wherein a second therapeutic agent or therapy is administered concurrently with an agent of any one of the preceding Embodiments.
[2452] 1213. The method of Embodiment 1208, wherein a second therapeutic agent or therapy is administered subsequently to an agent of any one of the preceding Embodiments.
[2453] 1214. The method of Embodiment 1208, wherein a second therapeutic agent or therapy is administered about or no more than about 1, 2, 3, 4, 5, 6, or 7 days, or 1, 2, 3, or weeks, or 1, 2, 3, 4, 5, or 6 months, subsequently to an agent of any one of the preceding Embodiments.
[2454] 1215. The method of any one of the preceding Embodiments, wherein a subject is exposed to a second therapeutic agent or therapy and an agent of any one of the preceding Embodiments.
[2455] 1216. The method of any one of the preceding Embodiments, wherein a subject is exposed to a therapeutic effect of a second therapeutic agent or therapy and a therapeutic effect of an agent of any one of the preceding Embodiments.
[2456] 1217. The method of any one of the preceding Embodiments, wherein a second therapeutic agent is or comprises a chemotherapy agent.
[2457] 1218. The method of any one of the preceding Embodiments, wherein a second therapeutic agent is or comprises a hormone therapy agent.
[2458] 1219. The method of any one of the preceding Embodiments, wherein a second therapeutic agent is or comprises an immunotherapy agent.
[2459] 1220. The method of any one of the preceding Embodiments, wherein a second therapeutic agent is or comprises a checkpoint inhibitor.
[2460] 1221. The method of any one of the preceding Embodiments, wherein a second therapeutic agent is or comprises an antibody.
[2461] 1222. The method of any one of the preceding Embodiments, wherein a second therapeutic agent is or comprises a CTLA-4, PD-1 or PD-L1 inhibitor.
[2462] 1223. The method of any one of the preceding Embodiments, wherein a second therapeutic agent is or comprises a cell.
[2463] 1224. The method of any one of the preceding Embodiments, wherein the second therapeutic agent reduces one or more side effects of an agent or composition of any one of the preceding Embodiments.
[2464] 1225. The method of any one of the preceding Embodiments, wherein the agent or composition reduces one or more side effects of a second therapeutic agent.
[2465] 1226. The method of any one of the preceding Embodiments, wherein a second therapy is or comprises surgery.
[2466] 1227. The method of any one of the preceding Embodiments, wherein a second therapy is or comprises chemotherapy.
[2467] 1228. The method of any one of the preceding Embodiments, wherein a second therapy is or comprises radiotherapy.
[2468] 1229. The method of any one of the preceding Embodiments, wherein a second therapy is or comprises hormone therapy.
[2469] 1230. The method of any one of the preceding Embodiments, wherein a second therapy is or comprises stem cell or bone marrow transplant.
[2470] 1231. The method of any one of the preceding Embodiments, wherein a second therapy is or comprises immunotherapy.
[2471] 1232. The method of any one of the preceding Embodiments, wherein a second therapy is or comprises T-cell therapy.
[2472] 1233. The method of any one of the preceding Embodiments, wherein a second therapy is or comprises CAR T-cell therapy.
[2473] 1234. The method of any one of the preceding Embodiments, wherein a second therapy is or comprises administering to the subject a population of immune cells.
[2474] 1235. The method of any one of the preceding Embodiments, wherein the agent or composition reduces one or more side effects of a second therapy.
[2475] 1236. The method of any one of the preceding Embodiments, wherein unit dose of a second therapy or therapeutic agent is reduced compared to when it is administered alone.
[2476] 1237. The method of any one of the preceding Embodiments, wherein total dose of a second therapy or therapeutic agent is reduced compared to when it is administered alone.
[2477] 1238. The method of any one of the preceding Embodiments, wherein unit dose of an agent or composition of any one of the preceding Embodiments is reduced compared to when it is administered alone.
[2478] 1239. The method of any one of the preceding Embodiments, wherein total dose of an agent or composition of any one of the preceding Embodiments is reduced compared to when it is administered alone.
[2479] 1240. The method of any one of the preceding Embodiments, wherein the combination therapy provides higher efficacy than when an agent or composition is administered or delivered alone.
[2480] 1241. The method of any one of the preceding Embodiments, wherein the combination therapy provides higher efficacy than when a second therapeutic agent or therapy is administered or delivered alone.

### EXEMPLIFICATION

[2481] Those skilled in the art appreciate that various technologies are available for manufacturing and assessing provided agents including various peptides such as stapled peptides in accordance with the present disclosure, for example, many technologies for preparing small molecules and peptides can be utilized to prepare provided agents, and various assays are available for assessing properties and/or activities of provided agents. Described below are certain such useful technologies.

### Example 1. Peptide Synthesis

[2482] Among other things, peptides can be prepared using various peptide synthesis technologies in accordance with the present disclosure. In many embodiments, peptides were prepared using Fmoc-based synthesis, often on suitable solid phase. For various stapled peptides, amino acid residues were stapled through suitable chemistry, e.g., olefin metathesis for amino acids that comprise olefin groups. Those skilled in the art appreciates that other suitable technologies may also be utilized for stapling in accordance with the present disclosure, e.g., those described in WO/2019/051327, WO/2020/041270, etc., the peptide staples and technologies for preparing peptides are incorporated herein by reference.

[2483] For example, in some embodiments, peptides were synthesized on a Liberty Blue peptide synthesizer with 1 M DIC in DMF and 1 M Oxyma in DMF using standard Liberty Blue conditions on either Rink Protide amide resin (primary carboxamides), ethyl indole AM resin (ethyl amides), or amino alcohol 2-chlorotrityl resin (amino alcohols). Single coupling was used for all amino acids, save for residues following a stapling amino acid, which were double coupled. Deprotection was performed on the N-terminal residue, and capping, e.g., acetate capping, was performed by treating the resin with a suitable capping agent, e.g., 5% acetic anhydride, 2.5% diisopropylethylamine and 92.5% NMP for acetate capping, at room temperature for 30 min. In some embodiments, methanesulfonate capping was performed with 10 equivalents of methanesulfonyl chloride and 30 equivalents of diisopropylethylamine in dichloroethane. Non-acetate amide caps were generally performed on the Liberty Blue with standard coupling conditions. Olefin metathesis was performed by treating peptides with suitable metathesis catalysts under suitable conditions, in some embodiments, four cycles of 30 mol % Grubbs' first generation catalyst (CAS 172222-30-9) in dichloroethane at 40° C. for 2 h.

[2484] Side chain functionalization of Dap, Dab and Lys residues was performed by incorporating (ivDde)-protected amino acids, and after olefin metathesis, deprotection with two cycles of 5% hydrazine in DMF at 40° C. for 30 min. Side chain attachment was performed by coupling a carboxylic acid with HATU in DMF and diisopropylethylamine at 40° C. Side chain functionalization of substituted asparagine residues was performed by incorporating an Asp(2-phenylisopropyl ester) residue, and after olefin metathesis, deprotection with 5% trifluoroacetic acid in dichloromethane for 10 min. Side chain attachment was performed by coupling an amine with HATU and DMF and diisopropylethylamine at 40° C.

[2485] Peptide cleavage was performed by treating resin with 95% trifluoroacetic acid and 5% triisopropylsilane for 1 h, and precipitation of the crude peptide in diethyl ether. Purification was performed by preparative HPLC with MS detection and a Waters XSelect CSH C18 column using water with 0.1% formic acid and acetonitrile with 0.1% formic acid. Typically, if isomers were identified and separated by HPLC purification they were isolated and tested separately, otherwise peptides were isolated (often based on HPLC peaks) and tested as combinations (all peptides within a single HPLC peak were tested together in a single composition).

[2486] Amino acids suitable for synthesis are commercially available or can be prepared in accordance with the present disclosure. Certain preparations are presented below as examples.

### Example 1-a. Synthesis of (S)-2-((((9H-fluoren-9-yl)methoxy)carbonyl)amino)-3-(2-(tert-butoxycarbonyl)phenyl)propanoic acid

[chemical structure]

[2488] To a solution of compound 1 in H₂O (250 mL) was added NaOH (84.0 g, 2.10 mol, 5.13 eq) and BnBr (328 g, 1.92 mol, 228 mL, 4.69 eq). The mixture was stirred at 85° C. for 16 hrs. LC-MS (EW24702-4-P1A) showed the compound 1 was consumed completely, and desired mass was detected (Rₜ=1.211 min). The mixture was cooled to 40° C. and the aqueous layer was removed. EtOAc (600 mL) and a mixture of methanol and water (1:2, 300 mL) were added. The mixture was washed with H₂O (300 mL). The organic layer was dried over Na₂SO₄, filtered and concentrated in vacuum. The residue was purified by column chromatography (SiO₂, Petroleum ether/Ethyl acetate=1/0, Petroleum ether:Ethyl acetate=10:1, R_{f}=0.7). Compound 2 (206 g, 400 mmol, 97.7% yield) was obtained as yellow oil. LCMS: Rₜ=1.211 min, m/z=514.3.1 (M+1)⁺. ¹HNMR (CDCl₃, 400 MHz) δ: 7.61 (dd, J₁=1.2 Hz, J₂=7.6 Hz, 1H), 7.92-7.87 (m, 5H), 7.77-7.66 (m, 11H), 7.64-7.59 (m, 2H), 5.81-5.63 (m, 2H), 4.48 (d, J=14 Hz, 2H), 4.41 (t, J=7.6 Hz, 1H), 4.07 (d, J=14 Hz, 2H), 3.74-3.69 (m, 2H).

[chemical structure]

[2489] A mixture of compound 2 (50.0 g, 97.1 mmol, 1.00 eq), Pd(OAc)₂ (1.09 g, 4.86 mmol, 0.05 eq), DPPF (5.39 g, 9.72 mmol, 0.1 eq) and KOAc (14.5 g, 147 mmol, 1.52 eq) in DMF (400 mL) and H₂O (100 mL) was degassed and purged with CO for 3 times, and then the mixture was stirred at 80° C. for 16 hrs under CO (50 psi) atmosphere. LC-MS (EW24702-5-P1A) showed the compound 2 wasn't consumed completely, and desired mass was detected (Rₜ=1.068 min). The reaction mixture was filtered. The filtrated was extracted with EtOAc (150 mL*3). The combined organic layers were washed with saturated brine (150 mL*3), dried over Na₂SO₄, filtered and concentrated under reduced pressure to give a residue. The crude product was purified by reversed-phase HPLC (FA condition). Compound 3 was obtained as yellow oil. LCMS: Rₜ=1.068 min, m/z=480.3 (M+1)⁺. ¹HNMR (CDCl3, 400 MHz) δ: 7.61 (dd, J₁=1.2 Hz, J₂=7.6 Hz, 1H), 7.44-7.39 (m, 8H), 7.20-7.10 (m, 11H), 5.29 (d, J=12.4 Hz 1H), 5.13 (d, J=12.4 Hz, 1H), 3.96 (d, J=13.6 Hz, 2H), 3.90-3.86 (m, 1H), 3.60-3.57 (m, 2H), 3.48-3.43 (m, 2H).

[chemical structure]

[2490] To a solution of compound 3 (23.0 g, 47.9 mmol, 1.00 eq) in THF (300 mL) was added TBTA (52.4 g, 239 mmol, 42.9 mL, 5.00 eq), BF₃·Et₂O (680 mg, 4.80 mmol, 591 uL, 0.1 eq), the mixture was stirred at 25° C. for 3 hrs. LC-MS (EW24702-8-P1A) showed the compound 3 was consumed completely, and desired mass was detected (R_{f}=1.279 min). The reaction mixture was quenched by addition citric acid 100 mL and extracted with EtOAc (200 mL*3). The combined organic layers were washed with saturated brine (200 mL*3), dried over Na₂SO₄, filtered and concentrated under reduced pressure to give a residue. The residue was purified by column chromatography (SiO₂, Petroleum ether/Ethyl acetate=1/0 to 10/1, Petroleum ether:Ethyl acetate=10/1, R_{f}=0.4). Compound 4 (25.0 g, 46.6 mmol, 97.3% yield) was obtained as colorless oil. LCMS: EW24702-8-P1A, Rₜ=1.279 min, m/z=536.5 (M+1)⁺. ¹HNMR (CDCl₃, 400 MHz) δ: 7.85 (dd, J₁=0.8 Hz, J₂=1.2 Hz, 1H), 7.42-7.29 (m, 7H), 7.17-7.14 (m, 7H), 7.05-7.03 (m, 4H), 5.28 (d, J=12.4 Hz, 1H), 5.16 (d, J=12.4 Hz, 1H), 3.96 (d, J=13.2 Hz, 2H), 3.85-3.81 (m, 1H), 3.61-3.56 (m, 1H), 3.51 (d, J=14 Hz, 2H), 3.34-3.28 (m, 1H), 1.35 (s, 9H). Chiral SFC: Column: Chiralcel OJ-3 50×4.6 mm I.D., 3 um. Mobile phase: Phase A for CO₂, and Phase B for MeOH (0.05% DEA); Gradient elution: MeOH (0.05% DEA) in CO₂ from 5% to 40%; Flow rate: 3 mL/min; Detector: PDA; Column Temp: 35° C.; Back Pressure: 100 Bar; Chiral purity: 100%.

[chemical structure]

[2491] Two batches were combined together. A mixture of compound 4 (25.0 g, 46.6 mmol, 1.00 eq) and Pd(OH)₂ (3.00 g, 4.27 mmol, 20.0% purity, 9.15e⁻² eq) in THF (750 mL) was degassed and purged with H₂ for 3 times. The mixture was stirred at 40° C. for 16 hrs under H₂ atmosphere (50 psi). LC-MS (EW24072-13-P1C) showed the compound 4 was consumed, desired mass was detected (Rₜ=0.740 min). The mixture was filtered, and the filtrated was used to the next reaction directly. LCMS Rₜ=0.740 min, m/z=210.1 (M−55)⁺.

[chemical structure]

[2492] A mixture of compound 5 (dissolved in THF), FMOC-OSU (11.1 g, 33.1 mmol, 0.8 eq) in THF (50.0 mL) was degassed and purged with N₂ for 3 times, and then the mixture was stirred at 25° C. for 12 hrs. LC-MS (EW24702-14-P1A) showed the compound 5 was consumed completely, and desired mass was detected (Rₜ=0.998 min). The mixture was filtered, and filtrated was concentrated under vacuum. Three batches were combined together. The mixture was purified with reversed-phase HPLC (TFA condition). 2COOHF (13.2 g, 19.1 mmol, 46.2% yield, 98.3% purity) was obtained as yellow solid. LCMS Rₜ=0.983 min, m/z=510.2 (M+23)⁺; HPLC Rₜ=3.49 min, purity: 98.3%. ¹HNMR (DMSO, 400 MHz) δ: 12.7 (s, 1H), 7.87 (d, J=7.6 Hz, 2H), 7.76-7.68 (m, 2H), 7.63-7.59 (m, 2H), 7.42-7.40 (m, 2H), 7.38-7.34 (m, 2H), 7.32-7.30 (m, 2H), 7.29-7.26 (m, 2H), 4.31-4.29 (m, 1H), 4.21-4.15 (m, 2H), 4.13-4.10 (m, 1H), 3.54 (d, J=5.2 Hz, 1H), 3.00-2.96 (m, 1H), 1.54 (s, 9H). Chiral SFC: Chiral purity: 100%; Column: Chiralcel OJ-3 50×4.6 mm I.D., 3 um; Mobile phase: Phase A for CO₂, and Phase B for MeOH (0.05% DEA); Gradient elution: MeOH (0.05% DEA) in CO2 from 5% to 40%; Flow rate: 3 mL/min; Detector: PDA; Column Temp: 35° C.; Back Pressure: 100Bar): Chiral purity: 100%.

### Example 1-b. Synthesis of tert-butyl (S)-3-(2-((((9H-fluoren-9-yl)methoxy)carbonyl)amino)-3-(benzyloxy)-3-oxopropyl)benzoate

[chemical structure]

[2494] A mixture of compound 1 (90.0 g, 202 mmol, 1.00 eq), compound 2 (49.4 g, 303 mmol, 1.50 eq), DCC (50.0 g, 242 mmol, 49.0 mL, 1.20 eq), DMAP (1.23 g, 10.1 mmol, 0.0500 eq) in THF (100 mL) was degassed and purged with N₂ for 3 times, and then the mixture was stirred at 20° C. for 12 hrs under N₂ atmosphere. LC-MS (EW23957-10-P1B) showed the compound 1 was consumed completely, and desired mass was detected (Rₜ=1.046 min). The mixture was filtered, and the filtrate was concentrated in vacuo. The crude product was purified by reversed-phase HPLC (0.1% FA condition). Compound 3 (68.0 g, 115 mmol, 56.9% yield) was obtained as a white solid. LCMS Rₜ=1.046 min, m/z=613.1 (M+23)⁺. ¹HNMR (DMSO, 400 MHz) δ: 8.11 (d, J=8.4 Hz, 1H), 7.98-7.96 (m, 4H), 7.89 (d, J=7.6 Hz, 2H), 7.69 (d, J=7.6 Hz, 2H), 7.42-7.28 (m, 10H), 5.16 (d, J=2.0 Hz, 2H), 4.64-4.62 (m, 1H), 4.33-4.31 (m, 2H), 4.24-4.21 (m, 1H), 3.39-3.37 (m, 1H), 3.25-3.19 (m, 1H).

[chemical structure]

[2495] To a solution of compound 6 (100 g, 403 mmol, 1.00 eq) in THF (500 mL) was added CDI (71.9 g, 443 mmol, 1.10 eq) and the mixture was stirred for 0.5 h. 2-methylpropan-2-ol (387 g, 5.23 mol, 500 mL, 12.9 eq) and DBU (67.5 g, 443 mmol, 66.8 mL, 1.10 eq) were subsequently added to the reaction. The mixture was stirred at 40° C. for 11.5 hrs. TLC (Petroleum ether:Ethyl acetate=5/1) showed the compound 6 was consumed completely (R_{f}=0.15), and two main spots were observed (Rₜ=0.90, 0). H₂O (500 mL) was added to the reaction. The mixture was extracted with EtOAc (500 mL*3). The combined organic layers were washed with saturated brine (500 mL*3), dried over Na₂SO₄, filtered and concentrated under reduced pressure to give a residue. The residue was purified by column chromatography (SiO₂, Petroleum ether/Ethyl acetate=0/1, R_{f}=0.90). Compound 4 (113 g, 371 mmol, 92.1% yield) was obtained as alight yellow oil. ¹HNMR (DMSO, 400 MHz) δ: 8.16 (t, J=1.6 Hz, 1H), 7.97 (m, 1H), 7.89 (m, 1H), 7.30 (t, J=8.0 Hz, 1H), 1.53 (s, 9H).

[chemical structure]

[2496] A solution of dibromonickel; 1,2-dimethoxyethane (2.85 g, 9.25 mmol, 7.03 e⁻² eq) and 4-tert-butyl-2-(4-tert-butyl-2-pyridyl)pyridine (2.48 g, 9.24 mmol, 7.03 e⁻² eq) in DMA (500 mL) was stirred at room temperature for 0.5 hr. Compound 3 (68.0 g, 115 mmol, 8.75 e⁻¹ eq), compound 4 (40.0 g, 131 mmol, 1.00 eq), dodecane (15.0 g, 88.0 mmol, 20.0 mL, 0.670 eq), Zn (30.0 g, 458 mmol, 3.49 eq) were added to the reaction. The mixture was stirred at 25° C. for 2.5 hrs. LC-MS (EW23957-16-P1A) showed Compound 3 was consumed completely, and desired mass was detected (R_{f}=1.126 min). The reaction mixture was quenched by the addition of HCl (500 mL). The resulting mixture was extracted with EtOAc (500 mL*3). The combined organic layers were washed with saturated brine (500 mL*3), dried over Na₂SO₄, filtered and concentrated under reduced pressure to give a residue. The crude product was purified by reversed-phase HPLC (0.1% FA condition). Compound 5 (35.0 g, 60.5 mmol, 46.0% yield) was obtained as a yellow oil. LCMS Rₜ=1.126 min, m/z=623.2 (M+46)⁺. ¹HNMR (CDCl₃, 400 MHz) δ: 7.88 (d, J=7.6 Hz, 1H), 7.80-7.76 (m, 3H), 7.56 (t, J=7.2 Hz, 2H), 7.42-7.29 (m, 10H), 7.20-7.19 (m, 1H), 5.37 (d, J=8.0 Hz, 1H), 5.17 (d, J=2.8 Hz, 2H), 4.81-4.71 (m, 1H), 4.42-4.36 (m, 2H), 4.13-4.20 (m, 1H), 3.21-3.17 (m, 2H), 1.58 (s, 9H).

[chemical structure]

[2497] To a solution of compound 5 (35.0 g, 60.5 mmol, 1.00 eq) in EtOAc (50.0 mL) was added Pd/C (3.50 g, 10.0% purity). The mixture was stirred at 25° C. for 2 hrs under H₂ (15 psi) atmosphere. LC-MS (EW23957-19-P1A) showed that compound 5 was consumed, and desired mass was detected (Rₜ=0.991 min). The mixture was filtered, and the filtrate was concentrated in vacuo. The mixture was purified by reversed-phase HPLC (FA condition). The final product (23.5 g, 48.0 mmol, 79.2% yield, 99.6% purity) was obtained as a white solid. LCMS Rₜ=1.088 min, m/z=510. (M+23)⁺. HPLC Rₜ=3.51 min, purity: 99.6%. ¹HNMR (DMSO, 400 MHz) δ: 7.87-7.84 (m, 3H), 7.80-7.74 (m, 2H), 7.62-7.51 (m, 3H), 7.41-7.37 (m, 3H), 7.31-7.23 (m, 2H), 4.24-4.20 (m, 1H), 4.20-4.19 (m, 2H), 4.19-4.14 (m, 1H), 3.18-3.13 (m, 1H), 2.98-2.91 (m, 1H), 1.51 (s, 9H). SFC: Chiral purity: 99.5%.

### Example 1-c. Synthesis of TfeGA

### Step 1: (S)-2-(((benzyloxy)carbonyl)amino)-3-((tert-butoxycarbonyl)amino)propanoic acid

[chemical structure]

[2499] A mixture of (S)-3-amino-2-(((benzyloxy)carbonyl)amino)propanoic acid (20 g, 84 mmol), (Boc)₂O (36.6 g, 168 mmol) and Na₂CO₃ (17.8 g, 168 mmol) in THF (400 mL) and water (250 mL) was stirred at room temperature for 3 h. The mixture was titrated with 1N HCl until the pH reached 3˜4. The aqueous phase was extracted with DCM (3×500 mL). The organic layers were collected, dried, and concentrated to afford the crude product (28.5 g, 100% yield) as a white solid. MS (ESI): m/z=361.1 [M+Na]⁺.

### Step 2: Benzyl (S)-2-(((benzyloxy)carbonyl)amino)-3-((tert-butoxycarbonyl)amino) propanoate

[chemical structure]

[2501] A mixture of (S)-2-(((benzyloxy)carbonyl)amino)-3-((tert-butoxycarbonyl)amino) propanoic acid (28.5 g, 84.3 mmol), benzyl bromide (21.6 g, 126.5 mmol) and Na₂CO₃ (17.8 g, 168.7 mmol) in DMF (500 mL) was stirred at room temperature for 3 h. The reaction mixture was diluted with ethyl acetate (2 L), washed with brine (5×500 mL), dried over Na₂SO₄ and filtered. The filtrate was concentrated and the crude mixture was purified by silica gel column chromatography (eluted with hexane/ethyl acetate=4:1, V/V) to afford the product (35.5 g, 99% yield) as a colorless oil. MS (ESI): m/z=451.1 [M+Na]⁺.

### Step 3: Benzyl (S)-3-amino-2-(((benzyloxy)carbonyl)amino)propanoate

[chemical structure]

[2503] A mixture of benzyl (S)-2-(((benzyloxy)carbonyl)amino)-3-((tert-butoxycarbonyl) amino)propanoate (35.5 g, 82.9 mmol) in TFA (100 mL) and DCM (100 mL) was stirred at room temperature for 3 h, then solvent was removed under reduced pressure. The mixture was titrated with sat. NaHCO₃until the pH reached 8-9. The aqueous phase was extracted with DCM (3×1000 mL). The organic layers were combined, dried, and concentrated to afford the product (26.8 g, 98.5% yield) as a colorless oil. MS (ESI): m/z=329.1 [M+H]⁺.

### Step 4: Benzyl (S)-2-(((benzyloxy)carbonyl)amino)-3-((2-(tert-butoxy)-2-oxoethyl)amino) propanoate

[chemical structure]

[2505] A mixture of benzyl (S)-3-amino-2-(((benzyloxy)carbonyl)amino)propanoate (13.5 g, 41.1 mmol) and tert-butyl 2-bromoacetate (8.03 g, 41.1 mmol) in DCM (250 mL) was stirred at room temperature for 2 days. Et₂NH (3 g, 41.1 mmol) was added and the reaction mixture was stirred at room temperature for 1 h. The mixture was titrated sat. NaHCO₃ until pH reached 8-9. The aqueous phase was extracted with DCM (3×500 mL). The organic layers were combined, dried, and concentrated. The crude mixture was purified by silica gel column chromatography (eluted with hexane/ethyl acetate=4:1, V/V) to afford the product (8.2 g, 45% yield) as a colorless oil. MS (ESI): m/z=443.2 [M+H]⁺.

### Step 5: Benzyl (S)-2-(((benzyloxy)carbonyl)amino)-3-((2-(tert-butoxy)-2-oxoethyl) (2,2,2-trifluoroethyl)amino)propanoate

[chemical structure]

[2507] To an oven-dried 500 ml round-bottomed flask fitted with a water condenser under an argon atmosphere (balloon) was added tetrahydrofuran (400 mL) and benzyl (S)-2-(((benzyloxy)carbonyl)amino)-3-((2-(tert-butoxy)-2-oxoethyl)amino)propanoate (11.5 g, 26 mmol) as the free base. The reaction flask was heated in an oil bath at 70° C. Phenylsilane (14.0 g, 130 mmol) in THF (25 mL) was added immediately via syringe, followed by TFA (14.1 g, 123.6 mmol) in THF (25 mL). The reaction was stirred at reflux for 4 h. The mixture was concentrated and titrated with sat. NaHCO₃ until pH reached 8-9. The aqueous phase was extracted with DCM (3×500 mL). The organic layers were combined, dried, and concentrated. The crude mixture was purified by silica gel column chromatography (eluted with hexane/ethyl acetate=6:1, V/V) to afford the product (11.2 g, 82% yield) as a colorless oil. MS (ESI): m/z=525.0 [M+H]⁺.

### Step 6: (S)-2-((((9H-fluoren-9-yl)methoxy)carbonyl)amino)-3-((2-(tert-butoxy)-2-oxoethyl)(2,2,2-trifluoroethyl)amino)propanoic acid

[chemical structure]

[2509] A mixture of benzyl (S)-2-(((benzyloxy)carbonyl)amino)-3-((2-(tert-butoxy)-2-oxoethyl)(2,2,2-trifluoroethyl)amino)propanoate (5.5 g, 10.5 mmol) and palladium on carbon (3 g, 10%) in MeOH (200 mL) and AcOH (8 mL) was attached to a hydrogenation apparatus. The system was evacuated and then refilled with hydrogen. The mixture was stirred at room temperature for 16 h. The reaction mixture was filtered. The filtrate was concentrated and re-dissolved in dioxane (150 mL) and water (150 mL). FmocOSu (3.36 g, 10 mmol) and NaHCO₃ (4.41 g, 52.5 mmol) were added. The mixture was stirred at room temperature for 16 h. The mixture was titrated with 0.5 N HCl until pH reached 4. The aqueous phase was extracted with ethyl acetate (3×500 mL). The organic layers were combined, dried, and concentrated. The crude mixture was purified by combiflash on C18 (0-80% MeCN/H₂O) to give the product (3.5 g, 64% yield) as a white solid. MS (ESI): m/z=523.0 [M+H]⁺. ¹H NMR, 400 MHz, DMSO-d6, δ 12.73 (s, 1H); 7.90 (d, J=7.6 Hz, 2H); 7.72 (d, J=7.6 Hz, 2H); 7.59 (d, J=8 Hz, 1H); 7.42 (t, J=7.2 Hz, 2H); 7.30 (t, J=7.2 Hz, 2H); 4.29-4.21 (m, 3H); 4.14-4.09 (m, 1H); 3.54-3.42 (m, 4H); 3.19 (dd, J1=14.2 Hz, J2=4.8 Hz, 1H); 3.00-2.95 (m, 1H); 1.42 (s, 9H).

### Example 2. Provided Technologies can Provide Improved Properties and/or Activities

[2510] Among other things, the present disclosure provides technologies for modulating properties and/or activities of products such as peptides through, e.g., incorporation of certain amino acid residues. As demonstrated herein, various amino acid residues, such as TfeGA and 3COOHF, can provide certain modulated properties (e.g., improved lipophilicity (in some instances, assessed by Log D values)) and/or activities compared to comparable residues (e.g., Aad, Asp, etc.) without significant negative impact on other properties and/or activities (e.g., solubility, binding to target proteins like beta-catenin, etc.). For example, as shown in Table E1, in some embodiments, the present disclosure provides peptides with increased lipophilicity. In some embodiments, the present disclosure provides peptides with improved Log D. In some embodiments, improvements are achieved by replacing an amino acid residue whose side chain comprises an acidic group (e.g., —COOH) but no amino group (e.g., Asp, Aad, etc.; a peptide comprising such an amino acid residue may be utilized in some embodiments as a reference peptide (e.g., when compared to a peptide in which such an amino acid residue (e.g., Asp, Aad, etc.) is replaced (e.g., with TfeGA) and which is otherwise identical)) with an amino acid residue whose side chain comprises an acidic group (e.g., —COOH) and an amino group (e.g., —N(R′)—)(e.g., TfeGA). In some embodiments, provided technologies can improve lipophilicity, Log D, etc. without undesirably impacting other properties and/or activities (e.g., solubility, target binding, etc.). In some embodiments, one or more additional properties and/or activities in addition to Log D were improved compared to reference peptides (e.g., peptides comprising an amino acid residue whose side chain comprises an acidic group (e.g., —COOH) but no amino group (e.g., Asp, Aad, etc.) but are otherwise identical).

[2511] In some embodiments, Log D was measured using a CHI Log D procedure: 3 uL of a 0.2 mM solution of peptide in 90% DMSO was injected onto a Phenonenex Gemini 3 um C18 110A column (50×3 mm), eluting with a gradient of 50 mM ammonium acetate pH 7.4 and acetonitrile. The retention time was compared to a standard calibration solution of 10 compounds to derive CHI Log D:

| Compound | Gradient tR at pH 7.4 | CHI at pH 7.4 |
|---|---|---|
| Theophylline | 1.671 | 18.40 |
| Phenyltetrazole | 1.768 | 23.60 |
| Benzimidazole | 1.911 | 34.30 |
| Colchicine | 2.132 | 42.00 |
| Phenyltheophylline | 2.271 | 51.20 |
| Acetophenone | 2.475 | 65.10 |
| Indole | 2.642 | 71.50 |
| Propiophenone | 2.734 | 77.40 |
| Butyrophenone | 2.932 | 87.50 |
| Valerophenone | 3.113 | 96.20 |

[2512] In some embodiments, solubility was assessed as follows: 50 uM peptide was incubated in 99.5% PBS/0.5% DMSO at 37° C. for 15 min. After ultracentrifugation of the PBS solution, the supernatant was analyzed by HPLC and compared to an HPLC injection 50 μM peptide DMSO solution. Solubility was determined by: [(Area of PBS peak)/(Area of DMSO peak)]*50 uM.

TABLE E1
Certain data for several peptides.

| | | bCat FP | | | | |
|---|---|---|---|---|---|---|
| Compound | | IC50 | | Solubility | NanoBRET | |
| ID | Notes | (nM) | LogD | (uM) | IC50 | |
| I-612 | only staple | 64 | 2.4 | >25 | | |
| | isomer isolated | | | | | |
| I-608 | Staple isomer 1 | 211 | 2.5 | >25 | n.d. | |
| I-609 | Staple isomer 2 | 80 | 2.5 | >25 | n.d. | |
| I-610 | Staple isomer 1 | 54 | 2.6 | >25 | n.d. | |
| I-611 | Staple isomer 2 | 55 | 2.6 | >25 | n.d. | |
| I-686 | Staple isomer 1 | <5 | 2.0 | >25 | 7.5 | uM |
| I-687 | Staple isomer 2 | 12 | 2.0 | >25 | n.d. | |
| I-761 | Staple isomer 1 | <5 | 2.2 | >25 | 5 | uM |

| | | | | | |
|---|---|---|---|---|---|
| I-762 | Staple isomer 2 | 6 | 2.2 | >25 | n.d. |

n.d.: not determined

### Example 3. Various Provided Peptides can Bind to Beta-Catenin

[2513] As those skilled in the art will appreciate, many technologies can be utilized in accordance with the present disclosure to assess binding to targets such as beta-catenin. Certain useful technologies and results are described below as examples.

[2514] In some embodiments, an assay is fluorescence polarization. A useful protocol is described below as an example.

[2515] Fluorescence polarization IC50: Using the Mosquito (SPT) peptide solutions were 3-fold serially diluted in 90% DMSO and 40 nL of titrated peptide was added into 20 uL buffer (50 mM HEPES, pH 7.5, 125 mM NaCl, 2% glycerol, 0.5 mM EDTA, 0.05% v/v pluronic acid) for final concentrations of 10 uM to 5 nM plated by Multidrop™ Combi (Thermo Scientific) into a black polystyrene 384-well plate (Corning). Probe solution (10 nM full-length beta-Catenin (Uniprot ID P35222), mixed with 10 nM 5FAM labeled TCF4 residues 10-53 (Uniprot ID Q9NQB0) peptide in buffer) was prepared and 20 uL per well was plated using a Multidrop™ Combi (Thermo Scientific). The plate was incubated protected from light for 60 minutes at 20° C. prior to read. Reads were performed on a CLARIOstar plate reader (BMG Labtech) in duplicate, and data were fitted to a 1:1 binding model with hill slope using an in-house script. All provided concentrations are final concentrations.

[2516] In some embodiments, an assay is an Alphascreen binding assay. A useful protocol is described below as an example.

[2517] Alphascreen binding assay: Using the AlphaScreen Histidine (Nickel Chelate) Detection Kit (PerkinElmer), peptide solutions were prepared in buffer (50 mM Tris pH 8.0, 250 mM NaCl, 2% glycerol, 0.03% Tween-20, 0.01% TritonX-100, 0.1% BSA w/v) using a 3-fold serial dilution from 10 uM to 5 nM. Probe solution (65 nM full-length B-Catenin (Uniprot ID P35222), mixed with 10 nM biotin labeled TCF4 residues 10-53 (Uniprot ID Q9NQB0) peptide in buffer) was prepared and 4 uL per well was plated in a white polystyrene 384-well plate (Corning). Equal volume of the titrated peptide was added to the plate and incubated for 15 minutes at 20° C. Then 4 uL of donor and 4 uL acceptor beads at 10 ug/mL were added to the plate, for a 16 uL reaction pool and protected from light for 60 minutes at 20° C. prior to read. Reads were performed on a CLARIOstar plate reader (BMG Labtech) in duplicate, and data were fitted to a 1:1 binding model with hill slope using an in-house script. All provided concentrations are final concentrations.

### Example 4. Provided Technologies can Modulate Interactions with Beta-Catenin in Cells

[2518] Various technologies may be utilized to assess properties and/or activities of provided compounds, e.g., stapled peptides, in cells. In some embodiments, a useful assay is Nano-BRET target engagement assay that assesses beta-catenin/TCF4 engagement. A useful protocol is described below as an example.

[2519] On Day 1, HEK293 cells were seeded. Use cells at ˜ 70% confluency. Trypsinize cells without washing with PBS as these cells can be fragile and come off easily. (e.g. 5 ml trypsin/75 flask for 2-5 min @ Rm Temp). Quench trypsin with 10 mL MEM media. Transfer cells to a falcon tube. Spin down @ 250 g for 5 minutes at Rm Temp. Discard SN. Gently re-suspend the cells in 10 mL MEM media. Count the cells twice and calculate how many cells are needed. Plate Parental HEK293 Cell Line at 7 M cells/12 ml/75 cm2 flask using MEM media. Rock plate a couple of times to disperse cells evenly. Incubate at 37° C., 5% CO2 for 5 hours. Cells should be evenly spread and about 70% confluent after 5h.

[2520] Transfection of Nano-BRET constructs (B-cat-Halo & TCF4-Luc): Allow Fugen-HD transfection reagent to reach room temperature. Mix by inverting tube, if precipitate is visible, warm up to 37° C. and them cool to Rm Temp. Check Flasks under microscope for confluency of cells (70-80%). Add LiCl to flask containing cells (LiCl 30 mM working concentration—LiCl can be a GSK3 inhibitor and reduce beta-catenin degradation). Prepare the transfection mix in a tube containing Assay media based on the manufacturer instruction (see below table for an example): Transfection mix preparation

| | | # of | | DNA | FuGene | Opti-MEM |
|---|---|---|---|---|---|---|
| # | Constructs | Flasks | Ratio | (ug) | (6 ul/w) | (ul) |
| 1-a | Bcat-Halo | 1 | 4 | 12.8 | 48 | 736 |
| 1-b | TCF4-Luc | 1 | 1 | 3.2 | | |

Add FuGene last and gently mix. Don't vortex. Incubate transfection mix at RT for 10-15 minutes. If more than one target pair is going to be tested, calculate the amounts of transfection mix using the above table for other construct pairs. Gently add 700 uL of transfection mix per flask and gently rock the plate a couple of times. Incubate cells at 37° C., 5% CO2 for 18-24 hours.

[2521] On Day 2, transfected cells were harvested and re-plated in 96-well plates. Collect media from flask in a Falcon tubes. This was to harvest the floaters as they may still be viable and transfected. Trypsinize cells without washing with PBS (5 ml trypsin/Flask). Quench trypsin with 5 mL of MEM media. Collect cells and add to falcon tube. Wash the flask with 5-10 ml of MEM media and add to falcon tube. Spin down @ 250 g for 5 minutes at Rm Temp. Discard SN. Gently Re-suspend cells in 5 ml Assay media (optionally containing LiCl). Count the cells twice and calculate the average count. Dispense 80 uL of cell suspension per each well of 96-well plate (20,000 cells/80 uL/well) (use plate such as Corning Solid White Flat Bottom TC-treated plate). LiCl at 30 mM concentration. Typically no cells to wells at the edge of the plate, instead add Assay media to these wells. Incubate cells at 37° C., 5% CO2 until peptide dilutions are ready.

[2522] Preparation of addition of compounds: Prepare a 10× Dose curve plate by serial dilution. Prepare Row A of Dose Curve Plate in Assay Media only (for 20 uM top conc. We need a 1/50 dilution of 10 mM). Prepare Assay Media plus DMSO (mix 9.8 part media+0.2 part DMSO) (e.g. 9.8 ml of Assay Media+0.2 ml of DMSO). 1:2 serial dilutions: Transfer Vol needed (50 uL) from Row A to Row B, mix 3 times, discard the tips. Continue 1:2 dilutions in each row by transferring 50 uL from higher dilution to lower dilution (e.g. 50 uL from Row B to C, etc.) Discard Vol needed (50 uL) from the last dilution (Row F).

### A Useful Dose Curve Plate Map (6 Point; Typically Use a V-Bottom or U-Bottom Non-Treated 96-Well Plate)

| Pep 1 | Pep 2 | Pep 3 | Pep 4 | Pep 5 | Pep 6 | Pep 7 | Pep 8 | Pep 9 | Pep 10 | Pep 11 | Pep 12 |
|---|---|---|---|---|---|---|---|---|---|---|---|
| 1 | 2 | 3 | 4 | 5 | 6 | 7 | 8 | 9 | 10 | 11 | 12 |
| 200 | | | | | | | | | | | |
| 100 | | | | | | | | | | | |
| 50 | | | | | | | | | | | |
| 25 | | | | | | | | | | | |
| 12.5 | | | | | | | | | | | |
| 6.25 | | | | | | | | | | | |
| Empty | | | | | | | | | | | |
| Empty | | | | | | | | | | | |

### A Useful Dose Curve Plate Map (3 Point; Typically Use a V-Bottom or U-Bottom Non-Treated 96-Well Plate)

| Pep 1 | Pep 2 | Pep 3 | Pep 4 | Pep 5 | Pep 6 | Pep 7 | Pep 8 | Pep 9 | Pep 10 | Pep 11 | Pep 12 |
|---|---|---|---|---|---|---|---|---|---|---|---|
| 1 | 2 | 3 | 4 | 5 | 6 | 7 | 8 | 9 | 10 | 11 | 12 |
| 200 | | | | | | | | | | | |
| 100 | | | | | | | | | | | |
| 50 | | | | | | | | | | | |
| Empty | | | | | | | | | | | |
| 200 | | | | | | | | | | | |
| 100 | | | | | | | | | | | |
| 50 | | | | | | | | | | | |
| Empty | | | | | | | | | | | |
| Pep 13 | Pep 14 | Pep 15 | Pep 16 | Pep 17 | Pep 18 | Pep 19 | Pep 20 | Pep 21 | Pep 22 | Pep 23 | Pep 24 |

[2525] Prepare Assay Plates+Peptide+Ligand

[2526] Certain wells are without cells, containing 100 uL of Assay media to avoid edge effect. Transfer 10 uL of each peptide dilution to corresponding well in Assay plate [containing cells (80 uL)] to achieve 1:10 final working dilution of peptides. Dilute HaloTag R NanoBRET™ 618 Ligand 1:100 in Assay media (Opti-MEM+4% FBS). Add 10 uL of Ligand per well of Assay plate (80 uL cell+10 uL compound+10 uL Ligand). Adjust the volume in control wells by adding Media or Media+DMSO to corresponding wells. Plus ligand=Add 10 uL Media+DMSO, or Media (for Media only control). No ligand=Add 10 uL Media+DMSO, or Media and add another 10 uL of media to top up to 100 uL. Incubate at 37° C., 500 CO2 overnight. A useful assay plate map—(use Corning Solid White Flat Bottom TC-treated plate) as example (0.5% DMSO in assay plate):

| Dose | | | | | | | | | | | | | |
|---|---|---|---|---|---|---|---|---|---|---|---|---|---|
| (uM) | A | 1 | 2 | 3 | 4 | 5 | 6 | 7 | 8 | 9 | 10 | 11 | 12 |
| 20 | B | Peptide 1 | | | Peptide 2 | | | Peptide 3 | | | Peptide 4 | | |
| 10 | C | | | | | | | | | | | | |
| 5 | D | | | | | | | | | | | | |
| 2.5 | E | | | | | | | | | | | | |
| 1.25 | F | | | | | | | | | | | | |
| 0.625 | G | | | | | | | | | | | | |

| | | |
|---|---|---|
| H | Media + DMSO (No Ligand) | Media + DMSO + Ligand |

[2527] In some embodiments, peptide 1 is 1-797, and peptide 2 is 1−686.

[2528] On Day 3, fluorescence was read with Nano-BRET substrates. Remove plates from incubator to allow to reach to RT (30 min). Also equilibrate CTG reagent to Rm Temp. Dilute Nano-BRET substrate 1:100 in Assay media. Add 25 uL of diluted substrate to each well and shake for 30 seconds. Read on ClarioSTAR or GloMAX right away (within 10 min). Donor emission @ 460 nm. Acceptor emission @ 618 nm. Use the same plate to measure cell viability (Cell Titer-Glo-2.0 (CTG) Viability test). After reading BRET signal, add CTG reagent to each well at 1:2 ratio and shake on orbital shaker for 2 min. Incubate at Rm Temp for 10-30 min. Read luminescence on ClarioSTAR or GloMAX. Analysis was performed using Prism. Non-linear regression. Log (inhibitor) vs response—variable slope (four parameters). For CTG data linear values (not logarithmic).

[2529] Certain results were presented below:

### CTG (CellTiter Glo):

| Conc. | Relative to Media | | | | | |
|---|---|---|---|---|---|---|
| (uM) | I-822 | | | I-797 | | |
| 20 | 82 | 83 | 92 | 92 | 91 | 92 |
| 10 | 90 | 90 | 92 | 100 | 100 | 102 |
| 5 | 94 | 95 | 95 | 102 | 100 | 104 |
| 2.5 | 99 | 98 | 98 | 103 | 107 | 105 |
| 1.25 | 94 | 98 | 99 | 104 | 103 | 101 |
| 0.625 | 100 | 102 | 104 | 104 | 104 | 103 |
| Media | 109 | 96 | 96 | | | |
| Avg of media | 100 | | | | | |

### BRET (Donor: 450 BP; Acceptor: 600 LP; Integration 0.3 s; Reading 1)

### Donor 450 BP

| | 1 | 2 | 3 | 4 | 5 | 6 | 7 | 8 | 9 | 10 | 11 | 12 |
|---|---|---|---|---|---|---|---|---|---|---|---|---|
| A | | I-822 | | | I-797 | | | | | | | |
| B | | 59340 | 52650 | 45840 | 58480 | 55870 | 47990 | | | | | |
| C | | 54740 | 47760 | 46640 | 58470 | 25870 | 40350 | | | | | |
| D | | 56000 | 46130 | 45780 | 38850 | 29900 | 47500 | | | | | |
| E | | 54130 | 32300 | 33550 | 34130 | 22720 | 40100 | | | | | |
| F | | 38290 | 28720 | 18860 | 21810 | 34520 | 71060 | | | | | |
| G | | 78090 | 58990 | 23030 | 25180 | 35670 | 47630 | | | | | |
| H | | | | | | | | | | | | |

### Acceptor 600 LP

| | 1 | 2 | 3 | 4 | 5 | 6 | 7 | 8 | 9 | 10 | 11 | 12 |
|---|---|---|---|---|---|---|---|---|---|---|---|---|
| A | | I-822 | | | I-797 | | | | | | | |
| B | | 450 | 450 | 280 | 860 | 660 | 640 | | | | | |
| C | | 490 | 470 | 470 | 790 | 350 | 470 | | | | | |
| D | | 630 | 600 | 430 | 510 | 420 | 630 | | | | | |
| E | | 740 | 360 | 420 | 460 | 220 | 510 | | | | | |
| F | | 470 | 380 | 260 | 300 | 410 | 860 | | | | | |
| G | | 1120 | 720 | 260 | 410 | 440 | 530 | | | | | |
| H | | | | | | | | | | | | |

### % Inhibition:

| Concentration (uM) | I-822 | | | I-797 | | |
|---|---|---|---|---|---|---|
| 20 | 52.9 | 40.7 | 71.4 | −36.7 | −0.3 | −19.5 |
| 10 | 35.7 | 24.5 | 21.5 | −21.7 | −21.9 | 1.7 |
| 5 | 6.8 | −15.3 | 30.1 | −16.9 | −28.4 | −18.6 |
| 2.5 | −23.7 | 8.1 | −9.2 | −21.3 | 26.5 | −11.7 |
| 1.25 | −6.1 | −18.2 | −25.1 | −24.8 | −1.1 | −4.0 |
| 0.625 | −32.1 | −5.3 | 6.3 | −56.5 | −6.9 | 8.3 |

[2534] In some embodiments, it was observed that amino acids with non-polar side chains (e.g., Leu) at X¹⁰ may provide improved affinity compared to amino acids with polar side chains (e.g., Asn). For example, see I-761 (X¹⁰=Asn, NanoBRET IC50=5 uM) and I-849 (X¹⁰=Leu, NanoBRET IC50=2.3 uM).

[2535] Among other things, NanoBRET data (and/or data from certain other assessments) indicated on-target activity. In some embodiments, optimization of certain residues, e.g., one or more residues at X², X⁵, X⁹, X² and/or X¹³, can improve binding affinity (e.g., I-926 to I-921).

[2536] Certain data of various peptides are presented in Table E2 as examples.

[2537] Various technologies may be utilized to deliver provided compounds, including various peptides, and compositions. In some embodiments, lipids are utilized to deliver provided compounds and compositions. In some embodiments, lipids form positively charged complexes with provided compounds, e.g., various peptides. In some embodiments, lipids non-covalently associate with provided compounds. In some embodiments, lipids non-covalently associate with provided compounds to form positively charged complexes. In some embodiments, the present disclosure provides a composition comprising a provided compound, e.g., a stapled peptide, and a lipid. In some embodiments, a lipid is SAINT-Protein (ST-Protein, Synvolux). Certain results are present below. As demonstrated, lipids can improve activities of various peptides:

### Nano-BRET:

| Abs IC50 (uM) | I-1001 (neg.) | I-849 | I-922 | I-762 | I-993 |
|---|---|---|---|---|---|
| Peptide only | inactive | 5 | 6 | 11 | 7 |
| Peptide + ST-Protein | inactive | 0.7 | 1 | 0.7 | 0.9 |

### TCF Reporter Assay:

| Abs IC50 (uM) | I-1001 (neg.) | I-849 | I-922 | I-762 | I-993 |
|---|---|---|---|---|---|
| Peptide only | inactive | 5 | 5 | 7 | 5 |
| Peptide + ST-Protein | inactive | 0.2 | 0.2 | 0.3 | 0.2 |

[2540] Assay were performed essentially as described above. Prepare 100× peptide dose curve in DMSO, then add fixed amount to HEPES in Pool B. Add SAINT-Protein (StPhD) in HEPES to achieve 10× mix, incubate at Rm Temp and add 10 uL to 90 uL of Cells+Ligand in cell culture plate.

| | | | | Conditions | | | | |
|---|---|---|---|---|---|---|---|---|
| | | | | Pool A | Pool B | | | |
| | Dose (uM) | | Final Vol | StPhD | Peptide prep | HEPES | Assay | % StPhD in |
| Ratio of | in final | Dose prep | (Pep + | ratio | in DMSO | minus | media + | 400 uL |
| Pep:StPhD | plate | (10X) | StPhD) | (uL) | (uL) | peptide (uL) | LiCl | media |
| peptide | 20 | 200 | 50 | 0 | 5.0 | 45.0 | 450 | 0.0 |
| only | 10 | 100 | 50 | 0 | 5.0 | 45.0 | 450 | 0.0 |
| | 5 | 50 | 50 | 0 | 5.0 | 45.0 | 450 | 0.0 |
| | 3 | 25 | 50 | 0 | 5.0 | 45.0 | 450 | 0.0 |
| | 1 | 13 | 50 | 0 | 5.0 | 45.0 | 450 | 0.0 |
| | 0.6 | 6 | 50 | 0 | 5.0 | 45.0 | 450 | 0.0 |
| 2.5:1 | 20 | 200 | 50 | 14.3 | 5.0 | 30.7 | 450 | 2.9 |
| (Pool B:Pool A) | 10 | 100 | 50 | 14.3 | 5.0 | 30.7 | 450 | 2.9 |
| | 5 | 50 | 50 | 14.3 | 5.0 | 30.7 | 450 | 2.9 |
| | 3 | 25 | 50 | 14.3 | 5.0 | 30.7 | 450 | 2.9 |
| | 1 | 13 | 50 | 14.3 | 5.0 | 30.7 | 450 | 2.9 |
| | 0.6 | 6 | 50 | 14.3 | 5.0 | 30.7 | 450 | 2.9 |

[2541] Transfer 10 uL/96 well corresponding wells which contain seeded cells in 80 uL media. To prepare DMSO control add 5 uL DMSO to 50 uL HEPES (same as peptide only prep). Add 10 uL of 1/100 dilution of ligand at the end (total volume is 20,000 cells/100 uL). Incubate at 37° C., overnight. Process data next day based on protocol sheet.

[2542] The “Rokhand-NanoBRET-Bcat-Protocal-Saint protein” Excel file contain CTG and GloMax reading data. What peptides were they for? It also mentioned the following peptides—were they tested? If yes, where are the data?

| # | ID | Volume (ul) |
|---|---|---|
| 1 | I-922 | 40 |
| 2 | I-762 | 40 |
| 3 | I-993 | 40 |
| 4 | I-1001 | 40 |
| 7 | I-849 | 40 |

### Example 5. Provided Technologies can Modulate Beta-Catenin Functions in Cells

[2543] As demonstrated in FIG. 1, provided technologies can modulate functions of beta-catenin in cells. Among other things, provided technologies can modulate expression levels of various genes regulated by beta-catenin/TCF. In some embodiments, provided technologies can reduce expression of certain genes such as AXIN2 and MYC. 1-796 is a negative control. A useful cell-based assay is described below.

[2544] A protocol for a gene expression assay:

[2545] Cell Line: The SW620 cell line was purchased from ATCC (ATCC CCL-227) and was grown in RPMI-1640 medium supplemented with 10% FBS (ThermoFisher Catalog #11875093, Catalog #10082147). Cell line was maintained in an incubator with a 5% CO2 atmosphere at 37° C.

[2546] Materials:
[2547] RNeasy Mini Kit Qiagen Catalog number: 74104
[2548] Primer/Probes from Applied Biosystems—Life Technology (20X)
[2549] Applied Biosystems High-Capacity cDNA Reverse Transcription Kit, Catalog number: 4368814
[2550] Applied Biosystems TaqMan Fast Advanced Master Mix, Catalog number: 4444557

[2551] Peptide Treatment:
[2552] 1. Remove medium from cell flask by aspiration, trypsinize (0.05% Trypsin) and allow cells to dissociate from the flask bottom.
[2553] 2. Neutralize trypsin using cell culture medium, count cells to estimate density and re-suspend to a final density of 7.5×104 cells/mL in 4% FBS containing cell culture medium.
[2554] 3. Plate 2 mL of cells (150,000 cells) into a well of a six-well plate.
[2555] 4. Allow the cells to attach and recover for overnight at 37° C., 5% CO₂.
[2556] 5. 24 hours after seeding cells treat with corresponding amounts of peptide normalizing the DMSO background concentrations to 0.2%.
[2557] 6. 48 hours after treatment remove medium from treated cells by aspiration, trypsinize (0.05% Trypsin) and allow cells to dissociate from the plate bottom.
[2558] 7. Neutralize trypsin using cell culture medium, count cells to estimate density and re-suspend in cold PBS.
[2559] 8. Spin cells down and remove PBS to move forward with RNA extraction.

[2560] RNA Extraction:
[2561] RNA Extraction was carried out using the Qiagen RNeasy Mini Kit and the protocol provided.
[2562] 1. Disrupt cells Disrupt the cells by adding Buffer RLT.
[2563] 2. Add 1 volume of 70% ethanol to the homogenized lysate, and mix well by pipetting.
[2564] 3. Transfer up to 700 uL of the sample, including any precipitate that may have formed, to an RNeasy spin column placed in a 2 mL collection tube (supplied). Close the lid gently, and centrifuge for 15 s at ≥8000×g (≥10,000 rpm).
[2565] 4. Add 700 uL Buffer RW1 to the RNeasy spin column. Close the lid gently, and centrifuge for 15 s at ≥8000×g (≥10,000 rpm).
[2566] 5. Add 500 uL Buffer RPE to the RNeasy spin column. Close the lid gently, and centrifuge for 15 s at ≥8000×g (≥10,000 rpm) to wash the spin column membrane.
[2567] 6. Add 500 uL Buffer RPE to the RNeasy spin column. Close the lid gently, and centrifuge for 2 min at ≥8000×g (≥10,000 rpm).
[2568] 7. Place the RNeasy spin column in a new 1.5 mL collection tube (supplied). Add 30-50 uL RNAse-free water directly to the spin column membrane. Close the lid gently, and centrifuge for 1 min at ≥8000×g (≥10,000 rpm) to elute the RNA.

[2569] cDNA Synthesis:
[2570] cDNA synthesis was carried out using the High-Capacity cDNA Reverse Transcription Kit and the protocol provided.
[2571] 1. Pipette 10 uL of 2×RT master mix into each well of a 96-well reaction plate or individual tube.
[2572] 2 Pipette 10 uL of RNA sample into each well, pipette up and down two times to mix.
[2573] 3. Seal the plates or tubes.
[2574] 4. Briefly centrifuge the plate or tubes to spin down the contents and to eliminate any air bubbles.
[2575] 5. Place the plate or tubes on ice until you are ready to load the thermal cycler.

### Thermo Cycling Conditions:

| | | |
|---|---|---|
| 1. | Temp: 25° C. | Time: 10 min |
| 2. | Temp: 37° C. | Time: 120 min |
| 3. | Temp: 85° C. | Time: 5 min |

[2577] Quantitative Real Time PCR:
[2578] 1. Samples were prepared using Applied Biosystems TaqMan Fast Advanced Master Mix and the protocol provided.
[2579] 2. Combine 2× Master Mix and 20× TaqMan Assay with water to bring volume to 18 uL. Transfer the appropriate volume of PCR reaction mix to each well of an optical reaction plate. Each well of reaction will received 1 uL of cDNA.
[2580] 3. Seal the reaction plate with optical adhesive film then centrifuge briefly to bring the PCR reaction mix to the bottom of the well and eliminate air bubbles.
[2581] 4. Apply a compression pad to the plate, if required by your real-time PCR system.

### Real-time PCR Cycling Conditions:

| | | |
|---|---|---|
| 1. | Temp 50° C. | Time: 2 min |
| 2. | Temp 95° C. | Time: 2 min |
| 3. | Temp 95° C. | Time: 1 second |
| 4. | Temp 60° C. | Time: 20 seconds |

### Gene Expression Analysis:

[2583] Relative qPCR was used calculate the relative expression level of the target gene as compared to ACTIN B their expression is relativized ROX according to the following formula: Relative gene expression=2^{-ΔΔCt} where ΔΔCt=ΔCt (sample)−ΔCt (DMSO control); and ΔCt=target gene Ct—reference gene (Actin B).

[2584] The present disclosure further demonstrates that provided technologies can modulate beta-catenin regulated expression without significantly impact beta-catenin-independent expression, e.g., beta-catenin-independent WNT target gene expression. Certain data were presented in FIG. 2.

[2585] Activities of provided technologies were also confirmed in TCF reporter assay as described below. Those skilled in the art will appreciate that other suitable reagents may be utilized and various parameters may be adjusted.

[2586] DLD1 reporter cell line was generated by using TCF/LEF luciferase Reporter Lentivirus (BPS Bioscience Catalog #79787). Parental DLD1 cells (ATCC@ CCL-221) were transfected with the lentivirus and followed by 3-day puromycin selection. Single clone was selected for Reporter assay.

[2587] On Day 1, cultured cells in flasks that are no more than about 60-70% confluent were washed with PBS and typsinized in 3 mL/T75 until cells were free floating. Spin down cells for 5 minutes at 1100RPM. While cells spin, determine the number of plates (3 compounds per plate) needed. After spinning, aspirate the supernatant gently and add 10 mL media (RPMI+4% FBS), and re-suspend and mix the cells gently. Count the cells twice in the cell counter Countess and take average of both the counts, and determine how many cells are needed. After plating cells at 5000 cells/well, seal with aerseal film. 90 uL cells/well. Incubate at 37° C. overnight, tap gently to mix and don't stack plates.

[2588] On Day 2, compounds were added. Stock solution was 10 mM. Make the DMSO containing media by adding 36 uL DMSO to 10 mL of media. Make the dilution wells by transferring 100 uL DMSO+Media into rows B-F of a protein LoBind 96-well plate. Row G is empty. Add any extra DMSO+media to row H. Transfer 4 uL of stock solution to Row A. One compound per column. Add 196 uL media to Row A, no DMSO in the media. Concentration of Row A was 200 uM. Mix well and do a 6 pt, 1:2 serial dilution, mix ×10 per transfer and change tips before each transfer. Removed excess volume from final well (row F) and discard. Transfer 10 uL of the compound containing media to cells with a multichannel according to plate maps. Add 60 uL DMSO containing media to the DMSO wells. The edge wells were typically not used in the assay and could be ignored if needed or replaced with PBS, but there typically were liquids in the wells. Cover plates with breathable plate sealer and incubate overnight.

[2589] A dilution chart is presented below as an example:

| | | |
|---|---|---|
| Starting Concentration (uM) | 10000 | |
| Media + compound Transfer onto | 10 | |
| cells (uL) | | |
| Total Volume needed/compound, | 60 | <-- BrightGlo(x3) + |
| no extra (uL) | | CTG(x3) |
| High Concentration Stock (uM) | 200 | |
| 100% DMSO to add to 10 mL | 36 | |
| media (uL) | | |
| Final Volume (in cell plate) | 100 | |
| Volume compound in DMSO (uM) | 4 | |
| Volume Media Added on top (uL) | 196 | |
| Volume DMSO + media in wells (uL) | 100 | <--Assumes |
| | | 1:2 dillution |
| Volume media to Xfer (uL) | 100 | <--Assumes |
| | | 1:2 dillution |
| Final DMSO concentration (%) | 0.18 | |

[2590] A 96-well plate may be utilized to prepare dilution series for up to 12 compounds, each with several concentrations (e.g., 200, 100, 50, 25, 12.5, 6.25 and 0 uM; can be utilized as 100× depending on final test concentrations).

[2591] Useful plate maps of cell plates with samples added as examples. 0 uM is the DMSO control for the whole plate. Edge well filled with 90 uL cells+10 uL DMSO containing media.

| | | | | | | | | | | | | |
|---|---|---|---|---|---|---|---|---|---|---|---|---|
| Concentration | 1 | 2 | 3 | 4 | 5 | 6 | 7 | 8 | 9 | 10 | 11 | 12 |

| (uM) | A | DMSO | | | | | |
|---|---|---|---|---|---|---|---|
| 20 | B | DMSO | Compound #1 | DMSO | Compound #2 | Compound #3 | DMSO |
| 10 | C | | | | | | |
| 5 | D | | | | | | |
| 2.5 | E | | | | | | |
| 1.25 | F | | | | | | |
| 0.625 | G | | | | | | |

| | |
|---|---|
| H | DMSO |

[2592] On Day 3, luciferase levels were assessed using Bright-Glo (Promega). Equilibrate Bright-Glo to room temperature before addition. 7 mL of mixed Bright-Gbo per plate. Unused Bright-Glo could be store at −80° C. Reconstituted reagent can be stored for up to 1 month at −80° C., or after one freeze-thaw. When ready to read, remove plates from incubator and let sit at room temperature for 15 minutes. Typically stagger taking out plates if reading multiple plates before adding the Bright-Glo. Add 90 uL/well Bright-Glo and shake gently for 3 minutes. Read luminescence on GloMax immediately using ‘BrightGlo’ programs.

[2593] Cellular activity was assessed using CTG. Equilibrate CTG reagents to room temperature. Equilibrate plates to room temp, e.g. 15 min. Use same time length for all plates. Add CTG reagent, 25 uL if using undiluted, or 90 uL if diluted 1 to 4. Shake for 2 min to induce cell lysis. Allow plate to to incubate at RT for 10 min to stabilize lumine sent signal. Read luminesence using program ‘CellTiter-Glo’. Use Prism to find the Absolute IC50 (AbsIC50=X[50]) of each compound.

[2594] Certain results are presented below as examples:
[2595] Plate 1—DLD1 TCF c2 BrightGlo
[2596] % Inhibition

| DMSO | | | | | | | | | |
|---|---|---|---|---|---|---|---|---|---|
| ave | 45325 | | | | | | | | |
| I-762 | | | DMSO | I-1001 | | | I-988 | | |
| 75.7 | 81.9 | 78.7 | 1.1 | −1.2 | 7.5 | 3.5 | 78.1 | 81.3 | 81.9 |
| 56.8 | 70.2 | 65.6 | −2.2 | −3.6 | −4.8 | −7.4 | 61.5 | 72.0 | 76.2 |
| 28.2 | 45.2 | 44.6 | −3.2 | −6.7 | −6.7 | −0.7 | 32.0 | 57.8 | 62.0 |
| 12.9 | 17.4 | 11.9 | −3.4 | −8.0 | −7.6 | −5.0 | 13.3 | 28.8 | 33.4 |
| 12.9 | 16.9 | 5.5 | 1.9 | −7.0 | −2.8 | 6.1 | 5.7 | 22.3 | 21.2 |
| 14.5 | 18.6 | 9.3 | 5.9 | −1.5 | 9.3 | 4.5 | 11.0 | 10.7 | 15.5 |

[2597] Plate 2—DLD1 TCF c2 BrightGlo
[2598] % Inhibition

| DMSO | | | | | | | | | |
|---|---|---|---|---|---|---|---|---|---|
| ave | 4.52E+04 | | | | | | | | |
| I-999 | | | DMSO | I-1000 | | | I-927 | | |
| 63.2 | 71.4 | 68.9 | 5.6 | 79.5 | 79.5 | 79.7 | 77.1 | 77.4 | 80.3 |
| 42.0 | 49.2 | 49.7 | −1.6 | 57.0 | 59.8 | 61.4 | 68.0 | 70.2 | 72.9 |
| 18.2 | 32.5 | 23.9 | −0.7 | 25.7 | 29.9 | 32.3 | 53.1 | 55.2 | 60.1 |
| 14.3 | 11.9 | 4.4 | −5.7 | 5.5 | 10.2 | 12.4 | 23.9 | 33.7 | 42.0 |
| 1.7 | 8.0 | 4.0 | 1.6 | −0.6 | −1.2 | 1.5 | 8.7 | 15.1 | 18.6 |
| 7.7 | 8.8 | 6.4 | 0.8 | −3.4 | 2.4 | 4.9 | 3.5 | 8.0 | 14.3 |

[2599] Plate 3—DLD1 TCF c2 BrightGlo
[2600] 0inhibition

| DMSO | | | | | | | | | |
|---|---|---|---|---|---|---|---|---|---|
| ave | 5.03E+04 | | | | | | | | |
| I-1050 | | | DMSO | I-1051 | | | I-1079 | | |
| 61.5 | 59.8 | 58.7 | 8.4 | 20.2 | 21.7 | 24.7 | 55.6 | 58.1 | 54.7 |
| 50.8 | 46.4 | 39.4 | 1.4 | 3.9 | 5.0 | −0.5 | 34.2 | 39.4 | 42.0 |
| 25.4 | 24.7 | 12.9 | −2.2 | −4.1 | −5.0 | −11.4 | 7.4 | 16.0 | 26.5 |
| 6.2 | 1.9 | −2.2 | −3.6 | −12.5 | −11.1 | −13.2 | −25.7 | −0.8 | 5.1 |
| 6.8 | −0.9 | −4.5 | −0.8 | −12.2 | −5.2 | −3.8 | 1.4 | −0.6 | 2.6 |
| 13.7 | 5.5 | 6.1 | −3.2 | −1.7 | −3.4 | 0.0 | 1.4 | 6.9 | 6.8 |

[2601] Plate 4—DLD1 TCF c2 BrightGlo
[2602] The ‘empty’ wells along the edges of the plates was either 200 uL PBS (DLD1 TCF Neg) or cells treated with DMSO only (DLD1 TCF c2)
[2603] % Inhibition

| DMSO | | | | | | | | | |
|---|---|---|---|---|---|---|---|---|---|
| ave | 4.84E+04 | | | | | | | | |
| I-1080 | | | DMSO | I-1081 | | | I-1082 | | |
| 51.4 | 56.9 | 51.8 | 4.7 | 67.2 | 69.3 | 72.3 | 76.5 | 77.1 | 79.9 |
| 42.4 | 42.2 | 38.1 | −1.7 | 45.6 | 49.8 | 55.3 | 63.9 | 71.0 | 75.0 |
| 24.9 | 31.0 | 24.4 | −2.9 | 17.5 | 23.8 | 31.0 | 38.5 | 56.2 | 62.0 |
| 14.6 | 19.8 | 7.9 | −1.0 | 4.5 | 7.9 | 15.2 | 17.3 | 36.1 | 37.9 |
| 16.0 | 13.8 | 12.3 | −5.8 | 0.8 | 2.4 | 5.4 | 14.0 | 21.5 | 24.0 |
| 20.2 | 13.7 | 15.3 | 6.8 | 9.2 | 7.1 | 11.5 | 14.1 | 17.4 | 20.3 |

[2604] Certain results were presented in FIG. 3.

[2605] Table E2. Certain data of various peptide compositions.
[2606] Structural information are described in Table E3. Compositions of stapled peptides.
[2607] 1. ID (may include batch number (e.g., −1)
[2608] 2: FP EC50 (nM)
[2609] 3: CHI Log D
[2610] 4: Solubility (uM)
[2611] 5: NanoBRET % inh @ 10 uM
[2612] 6: NanoBRET IC50 (uM)
[2613] 7: NanoBRET Abs IC50 (uM)
[2614] 8: DLD1 reporter assay Abs IC50 (uM)
[2615] 9: alphascreen EC50 (nM)

| 1 | 2 | 3 | 4 | 5 | 6 | 7 | 8 | 9 |
|---|---|---|---|---|---|---|---|---|
| I-1 | | 1.274 | | | | | | 10000 |
| I-2 | | 1.246 | | | | | | 10000 |
| I-3 | | 1.307 | | | | | | 9132 |
| I-4 | | 1.353 | | | | | | 5892 |
| I-5 | | 1.331 | | | | | | 10000 |
| I-6 | | 1.378 | | | | | | 6501 |
| I-7 | | 1.316 | | | | | | 10000 |
| I-8 | | 1.349 | | | | | | 10000 |
| I-9 | | 1.654 | | | | | | 10000 |
| I-10 | | 1.661 | | | | | | 10000 |
| I-11 | | 2.272 | | | | | | 10000 |
| I-12 | | 2.247 | | | | | | 10000 |
| I-13 | | 2.013 | | | | | | 10000 |
| I-14 | | 2.013 | | | | | | 9756 |
| I-15 | | 2.21 | | | | | | 10000 |
| I-16 | | 2.21 | | | | | | 10000 |
| I-17 | | 2.097 | | | | | | 10000 |
| I-18 | | 2.108 | | | | | | 10000 |
| I-19 | | 0.948 | | | | | | 10000 |
| I-20 | | 0.935 | | | | | | 10000 |
| I-21 | | 0.92 | | | | | | 10000 |
| I-22 | | 0.911 | | | | | | 10000 |
| I-23 | | 0.942 | | | | | | 9219 |
| I-24 | | 0.977 | | | | | | 8565.5 |
| I-25 | | 1.174 | | | | | | 7224 |
| I-26 | | 1.248 | | | | | | 8106.5 |
| I-27 | | 1.145 | | | | | | 6824 |
| I-28 | | 1.219 | | | | | | 8459.5 |
| I-29 | | 1.596 | | | | | | 10000 |
| I-30 | | 1.228 | | | | | | 8818.5 |
| I-31 | | 1.245 | | | | | | 7221.667 |
| I-32 | | 1.243 | | | | | | 7351 |
| I-33 | | 1.228 | | | | | | 9978.5 |
| I-34 | | 1.323 | | | | | | 10000 |
| I-35 | | 1.334 | | | | | | 9543.5 |
| I-36 | | 1.13 | | | | | | 8269.5 |
| I-37 | | 1.161 | | | | | | 10000 |
| I-38 | | 1.21 | | | | | | 10000 |
| I-39 | | 1.259 | | | | | | 10000 |
| I-40 | | 1.243 | | | | | | 10000 |
| I-41 | | 1.088 | | | | | | 10000 |
| I-42 | | 1.09 | | | | | | 9337 |
| I-43 | | 1.314 | | | | | | 10000 |
| I-44 | | 1.312 | | | | | | 10000 |
| I-45 | | 1.205 | | | | | | 10000 |
| I-46 | | 1.205 | | | | | | 10000 |
| I-47 | | 1.279 | | | | | | 10000 |
| I-48 | | 1.37 | | | | | | 10000 |
| I-49 | | 1.176 | | | | | | 10000 |
| I-50 | | 1.201 | | | | | | 10000 |
| I-51 | | 1.254 | | | | | | 10000 |
| I-52 | 3195 | 1.934 | 50 | | | | | 158 |
| I-53 | 5000 | 1.307 | | | | | | 1142 |
| I-54 | 3187 | 1.469 | | | | | | 482 |
| I-55 | 5000 | 1.351 | | | | | | 2384 |
| I-56 | | 2.164 | | | | | | 10000 |
| I-57 | | 2.152 | | | | | | 10000 |
| I-58 | | 1.495 | | | | | | 10000 |
| I-59 | | 1.531 | | | | | | 9876 |
| I-60 | | 1.365 | | | | | | 10000 |
| I-61 | | 1.446 | | | | | | 8905 |
| I-62 | | 0.981 | | | | | | 10000 |
| I-63 | | 1.019 | | | | | | 10000 |
| I-64 | 4246 | 1.222 | | | | | | 650 |
| I-65 | | 1.274 | | | | | | 2077 |
| I-66 | 1090 | 1.259 | | | | | | 174.5 |
| I-67 | 1227 | 1.24 | 50 | | | | | 154.5 |
| I-68 | | 1.553 | | | | | | 8120 |
| I-69 | | 1.593 | | | | | | 9096 |
| I-70 | | 1.609 | | | | | | 10000 |
| I-71 | | 1.686 | | | | | | 10000 |
| I-72 | | 1.721 | | | | | | 10000 |
| I-73 | | 1.723 | | | | | | 10000 |
| I-74 | | 1.329 | | | | | | 10000 |
| I-75 | | 1.376 | | | | | | 10000 |
| I-76 | | 1.198 | | | | | | 10000 |
| I-77 | | 1.285 | | | | | | 10000 |
| I-78 | 5000 | 1.242 | | | | | | 7478 |
| I-79 | | 1.274 | | | | | | 3970 |
| I-80 | | 1.045 | | | | | | 10000 |
| I-81 | | 1.063 | | | | | | 9775 |
| I-82 | | 1.003 | | | | | | 10000 |
| I-83 | | 1.032 | | | | | | 10000 |
| I-84 | | 0.985 | | | | | | 10000 |
| I-85 | | 0.998 | | | | | | 10000 |
| I-86 | | 1.237 | | | | | | 10000 |
| I-87 | | 1.152 | | | | | | 10000 |
| I-88 | | 1.239 | | | | | | 10000 |
| I-89 | | 0.967 | | | | | | 5640 |
| I-90 | | 0.958 | | | | | | 10000 |
| I-91 | | 1.13 | | | | | | 4720 |
| I-92 | | 1.199 | | | | | | 9155 |
| I-93 | | 1.321 | | | | | | 10000 |
| I-94 | | 1.409 | | | | | | 7009 |
| I-95 | | 1.308 | 33 | | | | | 8658 |
| I-96 | | 1.343 | | | | | | 10000 |
| I-97 | | 2.062 | | | | | | 7006.333 |
| I-98 | | 2.078 | | | | | | 10000 |
| I-99 | | 1.993 | | | | | | 10000 |
| I-100 | | 1.993 | | | | | | 9234 |
| I-101 | | 1.334 | | | | | | 10000 |
| I-102 | | 1.274 | | | | | | 10000 |
| I-103 | | 1.268 | | | | | | 4945 |
| I-104 | | 1.333 | | | | | | 6165 |
| I-105 | | 1.027 | | | | | | 10000 |
| I-106 | | 1.038 | | | | | | 10000 |
| I-107 | | 1.005 | | | | | | 10000 |
| I-108 | | 1.145 | | | | | | 10000 |
| I-109 | | 1.223 | | | | | | 8818 |
| I-110 | | 0.769 | | | | | | 8500 |
| I-111 | | 0.779 | | | | | | 7637 |
| I-112 | | 1.401 | | | | | | 10000 |
| I-113 | | 1.435 | | | | | | 6202 |
| I-114 | | 2.111 | | | | | | 4740 |
| I-115 | | 2.145 | | | | | | 4775 |
| I-116 | | 2.134 | 11 | | | | | 3639 |
| I-117 | | 1.328 | | | | | | 10000 |
| I-118 | | 1.545 | | | | | | 4363 |
| I-119 | | 1.17 | | | | | | 4943 |
| I-120 | | 1.243 | | | | | | 4553 |
| I-121 | | 0.825 | | | | | | 4462 |
| I-122 | | 0.84 | | | | | | 10000 |
| I-123 | 2112 | 1.978 | | | | | | 444 |
| I-124 | | 2.252 | | | | | | 1283 |
| I-125 | 3059 | 2.256 | | | | | | 569 |
| I-126 | | 2.239 | | | | | | 1478 |
| I-127 | 4841 | 2.245 | | | | | | 552 |
| I-128 | | 2.223 | | | | | | 907 |
| I-129 | 1981 | 2.108 | | | | | | 83 |
| I-130 | | 1.346 | | | | | | 797 |
| I-131 | 2160 | 1.496 | | | | | | 400 |
| I-132 | 5000 | 1.692 | 49 | | | | | 5094 |
| I-133 | 5000 | 2.383 | | | | | | 495 |
| I-134 | 2696 | 2.426 | | | | | | 99 |
| I-135 | 1867 | 2.178 | | | | | | 278.5 |
| I-136 | | 2.136 | | | | | | 3296 |
| I-137 | | 2.174 | | | | | | 1410 |
| I-138 | | 1.815 | | | | | | 10000 |
| I-139 | | 2.834 | | | | | | 10000 |
| I-140 | 2269 | 2.194 | 48 | | | | | 934 |
| I-141 | | 2.428 | | | | | | 5448 |
| I-142 | | 2.183 | | | | | | 7367 |
| I-143 | 2272 | 2.071 | | | | | | 733 |
| I-144 | 146.5 | 2.12 | | | | | | 66 |
| I-145 | | 2.283 | | | | | | 10000 |
| I-146 | | 2.004 | | | | | | 1224 |
| I-147 | 1637 | 1.399 | | | | | | 328 |
| I-148 | 2772 | 1.357 | | | | | | 398 |
| I-149 | | 1.27 | | | | | | 1789 |
| I-150 | | 1.297 | | | | | | 1940 |
| I-151 | | 1.355 | | | | | | 5502 |
| I-152 | 5000 | 1.337 | | | | | | 752 |
| I-153 | 2135 | 1.317 | | | | | | 153 |
| I-154 | 5000 | 1.426 | | | | | | 828 |
| I-155 | 5000 | 1.415 | | | | | | 734 |
| I-156 | | 1.066 | | | | | | 4177 |
| I-157 | | 1.202 | | | | | | 4059 |
| I-158 | | 1.23 | | | | | | 2170 |
| I-159 | | 1.452 | | | | | | 5353 |
| I-160 | | 1.49 | | | | | | 3238 |
| I-161 | | 0.816 | | | | | | 10000 |
| I-162 | | 0.827 | | | | | | 10000 |
| I-163 | | 1.29 | | | | | | 9752 |
| I-164 | | 1.359 | | | | | | 3613 |
| I-165 | | 1.998 | | | | | | 1233 |
| I-166 | 2164 | 2.06 | | | | | | 86.5 |
| I-167 | | 1.927 | | | | | | 6200 |
| I-168 | | 1.942 | | | | | | 5641 |
| I-169 | | 2.18 | | | | | | 9214 |
| I-170 | | 2.138 | | | | | | 4669 |
| I-171 | | 2.204 | | | | | | 2066 |
| I-172 | 5000 | 2.173 | 50 | | | | | 324 |
| I-173 | 3116 | 3.076 | 26 | | | | | 105 |
| I-174 | 1760 | 2.242 | | | | | | 116 |
| I-175 | 1760 | 2.242 | | | | | | 116 |
| I-176 | 1992 | 2.58 | | | | | | 549 |
| I-177 | 1992 | 2.58 | | | | | | 549 |
| I-178 | 1633 | 1.913 | | | | | | 152 |
| I-179 | 1633 | 1.913 | | | | | | 152 |
| I-180 | 561 | 2.193 | | | | | | 88 |
| I-181 | 310 | 2.213 | | | | | | 51 |
| I-182 | 2800 | 2.07 | | | | | | 750 |
| I-183 | | 2.213 | | | | | | 3766 |
| I-184 | 3109 | 2.265 | | | | | | 628 |
| I-185 | | 2.303 | | | | | | 2661 |
| I-186 | 5000 | 2.041 | | | | | | 518 |
| I-187 | 3318 | 2.083 | | | | | | 204 |
| I-188 | 1597 | 1.611 | | | | | | 156 |
| I-189 | 1597 | 1.611 | | | | | | 156 |
| I-190 | 696 | 1.736 | | | | | | 94 |
| I-191 | 1656 | 2.412 | | | | | | 240 |
| I-192 | 1656 | 2.412 | | | | | | 240 |
| I-193 | 533 | 2.462 | | | | | | 76 |
| I-194 | 1008 | 2.327 | | | | | | 105 |
| I-195 | | 2.983 | | | | | | 2177 |
| I-196 | | 3.711 | | | | | | 5513 |
| I-197 | | 3.809 | | | | | | 6145 |
| I-198 | 5000 | 2.368 | | | | | | 538 |
| I-199 | 5000 | 2.262 | | | | | | 796 |
| I-200 | 5000 | 2.278 | | | | | | 173 |
| I-201 | | 2.938 | | | | | | 6161 |
| I-202 | | 2.623 | | | | | | 7883 |
| I-203 | | 3.091 | | | | | | 5991 |
| I-204 | | 2.985 | | | | | | 7284 |
| I-205 | | 3.843 | | | | | | 10000 |
| I-206 | | 2.41 | | | | | | 2139 |
| I-207 | 1745 | 2.054 | | | | | | 143 |
| I-208 | 1745 | 2.054 | | | | | | 143 |
| I-209 | | 2.088 | | | | | | 1404 |
| I-210 | | 2.088 | | | | | | 1404 |
| I-211 | 5000 | 2.101 | | | | | | 367 |
| I-212 | 5000 | 2.101 | | | | | | 367 |
| I-213 | | 2.822 | | | | | | 8046 |
| I-214 | | 2.703 | | | | | | 7207 |
| I-215 | | 2.867 | | | | | | 10000 |
| I-216 | | 2.867 | | | | | | 10000 |
| I-217 | 1957 | 2.012 | | | | | | 90 |
| I-218 | 1957 | 2.012 | | | | | | 90 |
| I-219 | 2855 | 2.074 | | | | | | 131 |
| I-220 | 2855 | 2.074 | | | | | | 131 |
| I-221 | | 1.34 | | | | | | 6584 |
| I-222 | | 1.34 | | | | | | 6584 |
| I-223 | | 1.401 | | | | | | 4117 |
| I-224 | | 1.401 | | | | | | 4117 |
| I-225 | | 1.497 | | | | | | 7631 |
| I-226 | | 1.497 | | | | | | 7631 |
| I-227 | | 1.534 | 38 | | | | | 5912 |
| I-228 | | 1.534 | 38 | | | | | 5912 |
| I-229 | | 3.044 | | | | | | 5813 |
| I-230 | | 2.983 | | | | | | 4613 |
| I-231 | | 3.025 | | | | | | 6525 |
| I-232 | | 3.037 | | | | | | 7644 |
| I-233 | | 2.818 | | | | | | 5896 |
| I-234 | | 3.034 | | | | | | 7529 |
| I-235 | | 3.204 | | | | | | 7343 |
| I-236 | 5000 | 2.067 | | | | | | 384 |
| I-237 | 5000 | 2.067 | | | | | | 384 |
| I-238 | 1592 | 2.074 | | | | | | 267 |
| I-239 | 1592 | 2.074 | | | | | | 267 |
| I-240 | | 2.074 | | | | | | 3468 |
| I-241 | | 2.074 | | | | | | 3468 |
| I-242 | | 2.098 | | | | | | 4905 |
| I-243 | | 2.098 | | | | | | 4905 |
| I-244 | | 3.101 | | | | | | 2960 |
| I-245 | | 3.101 | | | | | | 2960 |
| I-246 | | 3.01 | | | | | | 3966 |
| I-247 | | 3.01 | | | | | | 3966 |
| I-248 | | 2.263 | | | | | | 2830 |
| I-249 | | 2.263 | | | | | | 2830 |
| I-250 | 5000 | 2.299 | | | | | | 1203 |
| I-251 | 5000 | 2.299 | | | | | | 1203 |
| I-252 | | 2.214 | | | | | | 3690 |
| I-253 | | 2.214 | | | | | | 3690 |
| I-254 | 5000 | 2.232 | | | | | | 1962 |
| I-255 | 5000 | 2.232 | | | | | | 1962 |
| I-256 | | 3.095 | 10 | | | | | 9207 |
| I-257 | | 2.913 | 10 | | | | | 3811 |
| I-258 | | 2.886 | | | | | | 2925 |
| I-259 | | 2.902 | | | | | | 4178 |
| I-260 | 5000 | 2.065 | | | | | | 683 |
| I-261 | 5000 | 2.014 | | | | | | 347 |
| I-262 | 5000 | 2.106 | | | | | | 967 |
| I-263 | 5000 | 2.128 | | | | | | 864 |
| I-264 | 5000 | 2.011 | | | | | | 364 |
| I-265 | 3762 | 2.032 | 36 | | | | | 194 |
| I-266 | 5000 | 2.016 | | | | | | 318 |
| I-267 | 5000 | 2.047 | 37 | | | | | 620 |
| I-268 | | 2.079 | 47 | | | | | 3999 |
| I-269 | | 1.814 | | | | | | 5311 |
| I-270 | 5000 | 2.496 | | | | | | 835 |
| I-271 | 5000 | 2.444 | 10 | | | | | 788 |
| I-272 | | 2.458 | | | | | | 1011 |
| I-273 | | 2.738 | 10 | | | | | 1890 |
| I-274 | | 2.619 | 10 | | | | | 2349 |
| I-275 | 5000 | 2.191 | 44 | | | | | 859 |
| I-276 | 3428 | 2.207 | | | | | | 329 |
| I-277 | | 2.186 | 45 | | | | | 6797 |
| I-278 | | 2.209 | | | | | | 2231 |
| I-279 | | 1.973 | | | | | | 4957 |
| I-280 | | 1.991 | | | | | | 3054 |
| I-281 | | 2.2 | | | | | | 6259 |
| I-282 | | 2.224 | | | | | | 3528 |
| I-283 | | 1.294 | | | | | | 9543 |
| I-284 | | 1.525 | 40 | | | | | 4348 |
| I-285 | 5000 | 1.491 | | | | | | 246 |
| I-286 | 4482 | 2.014 | | | | | | 450 |
| I-287 | 4954 | 1.875 | | | | | | 534 |
| I-288 | 1313 | 1.926 | 32 | | | | | 74 |
| I-289 | 5000 | 2.242 | | | | | | 626 |
| I-290 | 3286.5 | 2.271 | | | | | | 303 |
| I-291 | 3129 | 2.195 | | | | | | 327 |
| I-292 | 1871 | 2.208 | | | | | | 187 |
| I-293 | 139.5 | 2.382 | | | | | | 41 |
| I-294 | 130 | 1.996 | | | | | | 40 |
| I-295 | 5000 | 2.662 | | | | | | 1177 |
| I-296 | | 2.939 | | | | | | 1906 |
| I-297 | | 3.294 | | | | | | 5809 |
| I-298 | | 2.781 | | | | | | 3858 |
| I-299 | 1303 | 2.001 | | | | | | 189 |
| I-300 | | 2.817 | | | | | | |
| I-301 | | 3.262 | | | | | | |
| I-302 | | 2.38 | | | | | | |
| I-303 | | 3.131 | | | | | | |
| I-304 | 5000 | 2.339 | | | | | | |
| I-305 | 3982.5 | 2.348 | 10 | | | | | |
| I-306 | 5000 | 2.03 | | | | | | |
| I-307 | 4196 | 2.055 | | | | | | |
| I-308 | 5000 | 2.03 | | | | | | |
| I-309 | 3118 | 2.05 | | | | | | 181 |
| I-310 | | 2.188 | | | | | | 3243 |
| I-311 | | 2.226 | | | | | | 1238 |
| I-312 | | 2.134 | | | | | | 10000 |
| I-313 | | 2.159 | | | | | | 3600 |
| I-314 | | 2.344 | | | | | | 10000 |
| I-315 | | 2.359 | | | | | | 9897 |
| I-316 | 3982 | 1.906 | | | | | | 136 |
| I-317 | 5000 | 2.016 | | | | | | 443 |
| I-318 | 4633 | 2.001 | | | | | | 121 |
| I-319 | 1419 | 2.019 | | | | | | 54 |
| I-320 | | 2.041 | | | | | | 10000 |
| I-321 | | 2.073 | | | | | | 2242 |
| I-322 | 5000 | 1.933 | | | | | | 355 |
| I-323 | 3471 | 1.953 | | | | | | 92 |
| I-324 | | 2.596 | | | | | | 1745 |
| I-325 | 1310 | 1.976 | | | | | | 53 |
| I-326 | 1752 | 1.97 | 34 | | | | | |
| I-327 | 4724 | 1.958 | 43 | | | | | |
| I-328 | 1914 | 1.983 | 44 | | | | | |
| I-329 | 5000 | 2.01 | 41 | | | | | |
| I-330 | 5000 | 2.047 | 21 | | | | | |
| I-331 | 5000 | 2.024 | 41 | | | | | |
| I-332 | 5000 | 2.038 | 40 | | | | | |
| I-333 | 2756 | 2.12 | | | | | | |
| I-334 | 5000 | 1.863 | | | | | | |
| I-335 | 1544 | 1.928 | | | | | | |
| I-336 | 153 | 1.737 | 48 | | | | | |
| I-337 | 5000 | 1.579 | 48 | | | | | |
| I-338 | 5000 | 1.586 | 47 | | | | | |
| I-339 | 5000 | 1.328 | 50 | | | | | |
| I-340 | 5000 | 1.341 | 49 | | | | | |
| I-341 | 2000 | 1.732 | 38 | | | | | |
| I-342 | 58.5 | 2.074 | 50 | | | | | |
| I-343 | 172 | 1.931 | 50 | | | | | |
| I-344 | 42 | 1.977 | 44 | | | | | |
| I-345 | 134 | 2.144 | 49 | | | | | |
| I-346 | 180 | 1.943 | 44 | | | | | |
| I-347 | 121.5 | 1.956 | 50 | | | | | |
| I-348 | 5000 | 2.397 | 46 | | | | | 10000 |
| I-349 | 5000 | 2.415 | 49 | | | | | 7193 |
| I-350 | 5000 | 2.887 | 48 | | | | | 10000 |
| I-351 | 5000 | 2.944 | 50 | | | | | 10000 |
| I-352 | 5000 | 2.512 | 10 | | | | | 377 |
| I-353 | 5000 | 1.916 | 45 | | | | | 9291 |
| I-354 | 5000 | 1.947 | 50 | | | | | 2126 |
| I-355 | 5000 | 1.606 | 49 | | | | | 10000 |
| I-356 | 5000 | 1.619 | 50 | | | | | 8201 |
| I-357 | 5000 | 1.852 | 46 | −5.3 | | | | 10000 |
| I-358 | 5000 | 1.882 | 50 | | | | | 10000 |
| I-359 | 5000 | 2.055 | 30 | | | | | |
| I-360 | 145.5 | 2.017 | 44 | | | | | |
| I-361 | 42 | 2.058 | 46 | | | | | |
| I-362 | 3656 | 1.443 | 47 | | | | | |
| I-363 | 5000 | 2.09 | 32 | | | | | |
| I-364 | 5000 | 2.137 | 26 | | | | | |
| I-365 | 2715 | 2.038 | 48 | | | | | |
| I-366 | 1445 | 2.084 | | | | | | |
| I-367 | 177 | 2.154 | | | | | | |
| I-368 | 5000 | 2.168 | | | | | | |
| I-369 | 2311 | 1.661 | 40 | | | | | |
| I-370 | 1563 | 2.176 | 47 | | | | | |
| I-371 | 1389 | 2.136 | 48 | | | | | |
| I-372 | 2093 | 2.174 | 44 | | | | | |
| I-373 | 945 | 2.298 | 26 | | | | | |
| I-374 | 3011 | 2.242 | 49 | | | | | |
| I-375 | 3011 | 2.242 | 49 | | | | | |
| I-376 | 1321 | 2.296 | 48 | | | | | |
| I-377 | 1321 | 2.296 | 48 | | | | | |
| I-378 | 1336 | 2.143 | 50 | | | | | |
| I-379 | 1336 | 2.143 | 50 | | | | | |
| I-380 | 552 | 2.19 | 49 | | | | | |
| I-381 | 3653 | 2.636 | 10 | | | | | |
| I-382 | 2064 | 2.631 | 10 | | | | | |
| I-383 | 5000 | 1.859 | 36 | | | | | |
| I-384 | 177 | 1.837 | 45 | | | | | |
| I-385 | 3150 | 1.713 | 50 | | | | | |
| I-386 | 5000 | 2.14 | 47 | | | | | |
| I-387 | 2621 | 2.136 | 48 | | | | | |
| I-388 | 5000 | 2.863 | 10 | | | | | |
| I-389 | 5000 | 2.868 | 17 | | | | | |
| I-390 | 3422 | 2.587 | 10 | | | | | |
| I-391 | 1913 | 2.585 | 10 | | | | | |
| I-392 | 5000 | 2.518 | 10 | | | | | |
| I-393 | 1953 | 2.641 | 10 | | | | | |
| I-394 | 5000 | 3.86 | | | | | | |
| I-395 | 5000 | 4.073 | | | | | | |
| I-396 | 3427 | 2.819 | | | | | | |
| I-397 | 2229 | 2.828 | | | | | | |
| I-398 | 2155 | 1.846 | 46 | | | | | |
| I-399 | 2499 | 2.516 | | | | | | |
| I-400 | 3587 | 1.919 | | | | | | |
| I-401 | 134 | 2.281 | | | | | | |
| I-402 | 5000 | 3.393 | | | | | | |
| I-403 | 2128 | 2.865 | | | | | | |
| I-404 | 1851 | 2.396 | | | | | | |
| I-405 | 3821 | 1.723 | | | | | | |
| I-406 | 94 | 2.038 | 28 | | | | | |
| I-407 | 30 | 2.394 | 50 | 55.1 | | | | |
| I-408 | 120 | 2.674 | 50 | | | | | |
| I-409 | 70 | 2.741 | 48 | | | | | |
| I-410 | 50 | 2.26 | 50 | | | | | |
| I-411 | 189 | 2.567 | 50 | | | | | |
| I-412 | 92 | 2.651 | | | | | | |
| I-413 | 90 | 2 | 31 | | | | | |
| I-414 | 3417 | 2.096 | 19 | | | | | |
| I-415 | 2201 | 2.125 | 45 | | | | | |
| I-416 | 5000 | 2.058 | 44 | | | | | |
| I-417 | 5000 | 2.085 | 30 | | | | | |
| I-418 | 149 | 2.089 | 32 | | | | | |
| I-419 | 23 | 2.114 | | | | | | |
| I-420 | 127.5 | 2.157 | 24 | | | | | |
| I-421 | 99 | 2.087 | 36 | | | | | |
| I-422 | 27 | 2.136 | 24 | | | | | |
| I-423 | 105 | 2.089 | 48 | | | | | |
| I-424 | 170 | 1.968 | 50 | | | | | |
| I-425 | 50 | 2.01 | 45 | | | | | |
| I-426 | 109 | 1.959 | 33 | | | | | |
| I-427 | 38.5 | 1.985 | 50 | | | | | |
| I-428 | 60 | 1.987 | 14 | | | | | |
| I-429 | 146 | 2.069 | 50 | | | | | |
| I-430 | 154 | 2.133 | | | | | | |
| I-431 | 1320 | 2.225 | 33 | | | | | |
| I-432 | 145 | 2.234 | 23 | | | | | |
| I-433 | 136 | 2.078 | 39 | | | | | |
| I-434 | 67.5 | 2.049 | 20 | | | | | |
| I-435 | 70 | 2.133 | 50 | | | | | |
| I-436 | 56 | 2.159 | 50 | | | | | |
| I-437 | 26 | 2.001 | 44 | | | | | |
| I-438 | 5000 | 1.39 | 46 | | | | | |
| I-439 | 5000 | 1.408 | 50 | | | | | |
| I-440 | 5000 | 1.613 | 50 | | | | | |
| I-441 | 133 | 2.005 | 38 | | | | | |
| I-442 | 4484 | 2.098 | 40 | | | | | |
| I-443 | 2126 | 2.128 | 50 | | | | | |
| I-444 | 80 | 1.987 | 50 | | | | | |
| I-445 | 4962 | 2.054 | 43 | | | | | |
| I-446 | 130 | 1.97 | 44 | | | | | |
| I-447 | 74 | 1.996 | 50 | | | | | |
| I-448 | 92 | 1.976 | 50 | | | | | |
| I-449 | 53 | 1.998 | 30 | | | | | |
| I-450 | 3717 | 1.875 | 50 | | | | | |
| I-451 | 5000 | 1.88 | 50 | | | | | |
| I-452 | 1656 | 1.917 | 50 | | | | | |
| I-453 | 1554 | 2.007 | | | | | | |
| I-454 | 125 | 2.0462 | | | | | | |
| I-455 | 83.5 | 2.0374 | | | | | | |
| I-456 | 2168 | 2.0045 | | | | | | |
| I-457 | 1435 | 2.0242 | | | | | | |
| I-458 | 101.5 | 2.0703 | | | | | | |
| I-459 | 183 | 2.0572 | | | | | | |
| I-460 | 195.5 | 1.9935 | | | | | | |
| I-461 | 125 | 1.9364 | | | | | | |
| I-462 | 28 | 1.757 | 49 | | | | | |
| I-463 | 92 | 1.785 | | | | | | |
| I-464 | 57 | 1.831 | | | | | | |
| I-465 | 81 | 2.023 | 40 | | | | | |
| I-466 | 19 | 2.069 | 50 | | | | | |
| I-467 | 44 | 2.255 | 50 | | | | | |
| I-468 | 27 | 2.292 | 41 | | | | | |
| I-469 | 27 | 2.354 | | | | | | |
| I-470 | 11 | 2.394 | | 14.1 | | | | |
| I-471 | 52 | 2.429 | 13 | | | | | |
| I-472 | 62 | 2.416 | 36 | | | | | |
| I-473 | 121 | 2.076 | 39 | | | | | |
| I-474 | 43 | 2.114 | 50 | | | | | |
| I-475 | 102 | 2.277 | 43 | | | | | |
| I-476 | 48 | 2.317 | 49 | | | | | |
| I-477 | 119 | 2.005 | 49 | | | | | |
| I-478 | 71 | 2.052 | 42 | | | | | |
| I-479 | 27 | 2.094 | 38 | | | | | |
| I-480 | 176 | 2.096 | 36 | | | | | |
| I-481 | 42 | 2.133 | 30 | | | | | |
| I-482 | 118 | 2.485 | | | | | | |
| I-483 | 5000 | 1.845 | 43 | | | | | |
| I-484 | 5000 | 1.863 | 45 | | | | | |
| I-485 | 34 | 2.297 | 50 | | | | | |
| I-486 | 147 | 1.97 | 50 | | | | | |
| I-487 | 45 | 1.99 | 44 | | | | | |
| I-488 | 43 | 2.396 | 30 | | | | | |
| I-489 | 57 | 2.337 | 36 | | | | | |
| I-490 | 88 | 2.211 | 50 | | | | | |
| I-491 | 153 | 2.023 | 39 | | | | | |
| I-492 | 53 | 2.052 | 49 | | | | | |
| I-493 | 88 | 2.197 | 50 | | | | | |
| I-494 | 82 | 2.052 | 44 | | | | | |
| I-495 | 181 | 2.354 | | | | | | |
| I-496 | 5000 | 2.456 | 41 | | | | | |
| I-497 | 5000 | 2.6 | 29 | | | | | |
| I-498 | 5000 | 2.637 | 42 | | | | | |
| I-499 | 123 | 2.167 | 48 | | | | | |
| I-500 | 176 | 2.626 | 28 | | | | | |
| I-501 | 94 | 2.138 | 49 | | | | | |
| I-502 | 55 | 2.171 | 50 | | | | | |
| I-503 | 84 | 2.094 | 33 | | | | | |
| I-504 | 65 | 2.222 | 18 | | | | | |
| I-505 | 23 | 2.259 | 50 | | 5.6 | 4.9 | 10.8 | |
| I-506 | 25 | 2.412 | 10 | | | | | |
| I-507 | 192 | 2.079 | 47 | | | | | |
| I-508 | 73 | 2.126 | 50 | | | | | |
| I-509 | 99 | 2.163 | 41 | | | | | |
| I-510 | 128 | 2.057 | 43 | | | | | |
| I-511 | 40 | 2.099 | 29 | | | | | |
| I-512 | 20 | 2.437 | 17 | | | | | |
| I-513 | 143 | 1.569 | 50 | | | | | |
| I-514 | 30 | 1.911 | 50 | | | | | |
| I-515 | 54 | 2.028 | 46 | | | | | |
| I-516 | 23 | 2.072 | 42 | | | | | |
| I-517 | 15 | 2.421 | 15 | | | | | |
| I-518 | 143 | 1.966 | 39 | | | | | |
| I-519 | 33 | 2.004 | 50 | | | | | |
| I-520 | 45 | 2.313 | 50 | | | | | |
| I-521 | 23 | 2.351 | 50 | | | | | |
| I-522 | 75 | 2.214 | 50 | | | | | |
| I-523 | 44 | 2.241 | 50 | | | | | |
| I-524 | 2550 | 1.889 | 50 | | | | | |
| I-525 | 196 | 2.019 | | | | | | |
| I-526 | 56 | 2.049 | | | | | | |
| I-527 | 98 | 2.376 | | | | | | |
| I-528 | 63 | 2.395 | | | | | | |
| I-529 | 5000 | 2.854 | 50 | | | | | |
| I-530 | 5000 | 2.935 | 50 | | | | | |
| I-531 | 5000 | 2.794 | 43 | | | | | |
| I-532 | 5000 | 2.858 | 42 | | | | | |
| I-533 | 155 | 2.289 | 44 | | | | | |
| I-534 | 5000 | 2.432 | 31 | | | | | |
| I-535 | 5000 | 2.858 | 47 | | | | | |
| I-536 | 4469 | 2.746 | 23 | | | | | |
| I-537 | 5000 | 2.871 | 11 | | | | | |
| I-538 | 5000 | 2.753 | 33 | | | | | |
| I-539 | 5000 | 2.944 | 10 | | | | | |
| I-540 | 5000 | | | | | | | |
| I-541 | 180 | 2.087 | 50 | | | | | |
| I-542 | 109 | 2.135 | 39 | | | | | |
| I-543 | 32 | 2.474 | 28 | | | | | |
| I-544 | 24 | 2.478 | 48 | | | | | |
| I-545 | 21 | 2.574 | 46 | | | | | |
| I-546 | 16 | 2.4 | 50 | | | | | |
| I-547 | 43 | 2.45 | | | | | | |
| I-548 | 17 | 2.528 | 50 | | | | | |
| I-549 | 71 | 2.291 | | | | | | |
| I-550 | 30 | 2.343 | 50 | | | | | |
| I-551 | 45 | 2.278 | 50 | | | | | |
| I-552 | 15.5 | 2.334 | | | | | | |
| I-553 | 61 | 2.398 | | | | | | |
| I-554 | 27.5 | 2.457 | 35 | | | | | |
| I-555 | 41 | 2.374 | 41 | | | | | |
| I-556 | 20 | 2.435 | 39 | | | | | |
| I-557 | 35 | 2.391 | 47 | | | | | |
| I-558 | 56 | 2.308 | | | | | | |
| I-559 | 43 | 2.341 | | | | | | |
| I-560 | 81 | 2.391 | | | | | | |
| I-561 | 34 | 2.437 | 14 | | | | | |
| I-562 | 51 | 2.269 | | | | | | |
| I-563 | 19 | 2.317 | 50 | | | | | |
| I-564 | 36 | 2.374 | 47 | | | | | |
| I-565 | 13 | 2.435 | 26 | | | | | |
| I-566 | 76 | 2.175 | | | | | | |
| I-567 | 37 | 2.243 | 50 | 8.9 | | | | |
| I-568 | 73 | 2.158 | | | | | | |
| I-569 | 42 | 2.169 | 49 | | | | | |
| I-570 | 56 | 2.219 | | | | | | |
| I-571 | 32 | 2.245 | 24 | | | | | |
| I-572 | 73 | 2.064 | | | | | | |
| I-573 | 36 | 2.116 | 49 | | | | | |
| I-574 | 36 | 2.16 | 48 | | | | | |
| I-575 | 21 | 2.21 | 46 | | | | | |
| I-576 | 23 | 2.348 | 46 | | | | | |
| I-577 | 13 | 2.376 | 47 | | | | | |
| I-578 | 5000 | 2.257 | 50 | | | | | |
| I-579 | 5000 | 1.506 | 45 | | | | | |
| I-580 | 114 | 2.436 | 24 | | | | | |
| I-581 | 112 | 2.458 | | | | | | |
| I-582 | 17.5 | 2.504 | 22 | | | | | |
| I-583 | 69 | 2.563 | −1 | | | | | |
| I-584 | 33 | 2.635 | 21 | | | | | |
| I-585 | 5000 | 2.364 | 50 | | | | | |
| I-586 | 5000 | 2.39 | 50 | | | | | |
| I-587 | 5000 | 2.145 | 50 | | | | | |
| I-588 | 5000 | 2.873 | 49 | | | | | |
| I-589 | 48 | 2.119 | | | | | | |
| I-590 | 45 | 2.152 | | | | | | |
| I-591 | 64 | 2.348 | | | | | | |
| I-592 | 24 | 2.414 | | | | | | |
| I-593 | 68 | 2.119 | | | | | | |
| I-594 | 87 | 2.611 | | | | | | |
| I-595 | 57 | 2.644 | | | | | | |
| I-596 | 112 | 2.373 | | | | | | |
| I-597 | 76 | 2.39 | | | | | | |
| I-598 | 845 | 2.244 | 49 | | | | | |
| I-599 | 138 | 2.425 | 45 | | | | | |
| I-600 | 796 | 2.694 | 47 | | | | | |
| I-601 | 419 | 2.748 | 43 | | | | | |
| I-602 | 3150 | 3.146 | −1 | | | | | |
| I-603 | 392 | 2.624 | 10 | | | | | |
| I-604 | 692 | 2.609 | 10 | | | | | |
| I-605 | 632 | 2.617 | 10 | | | | | |
| I-606 | 289 | 2.412 | 49 | | | | | |
| I-607 | 253 | 2.416 | 48 | | | | | |
| I-608 | 211 | 2.506 | 40 | | | | | |
| I-609 | 80 | 2.534 | 43 | | | | | |
| I-610 | 54 | 2.587 | 49 | | | | | |
| I-611 | 55 | 2.595 | 48 | | | | | |
| I-612 | 64 | 2.414 | 49 | | | | | |
| I-613 | 1627 | 2.781 | 10 | | | | | |
| I-614 | 1143 | 2.801 | 10 | | | | | |
| I-615 | 50 | 2.826 | 10 | | | | | |
| I-616 | 108 | 2.413 | 10 | | | | | |
| I-617 | 253 | 2.549 | 10 | | | | | |
| I-618 | 135 | 2.617 | 10 | | | | | |
| I-619 | 44 | 2.677 | 47 | | | | | |
| I-620 | 35 | 2.688 | 48 | | 5.8 | | | |
| I-621 | 58 | 2.338 | 50 | | | | | |
| I-622 | 230 | 2.453 | 45 | | | | | |
| I-623 | 103 | 2.494 | 44 | | | | | |
| I-624 | 273 | 2.598 | 27 | | | | | |
| I-625 | 119 | 2.681 | 47 | | | | | |
| I-626 | 5000 | 2.048 | 50 | | | | | |
| I-627 | 338 | 3.002 | 47 | | | | | |
| I-628 | 713 | 3.103 | 47 | | | | | |
| I-629 | 685 | 3.109 | 40 | | | | | |
| I-630 | 5000 | 4.36 | | | | | | |
| I-631 | 5000 | 4.365 | | | | | | |
| I-632 | 5000 | 3.155 | | | | | | |
| I-633 | 88 | 2.624 | 10 | | | | | |
| I-634 | 425 | 2.764 | 49 | | | | | |
| I-635 | 171 | 2.734 | 43 | | | | | |
| I-636 | 198 | 2.569 | 50 | | | | | |
| I-637 | 5000 | 2.554 | 50 | | | | | |
| I-638 | 3876 | 2.622 | 48 | | | | | |
| I-639 | 109 | 2.49 | 44 | | | | | |
| I-640 | 87 | 2.516 | 50 | | | | | |
| I-641 | 122 | 2.497 | 43 | | | | | |
| I-642 | 118 | 2.512 | 48 | | | | | |
| I-643 | 958 | 2.833 | 28 | | | | | |
| I-644 | 808 | 2.837 | 22 | | | | | |
| I-645 | 395 | 2.677 | 40 | | | | | |
| I-646 | 461 | 2.694 | 41 | | | | | |
| I-647 | 445 | 2.677 | 50 | | | | | |
| I-648 | 233 | 2.721 | 46 | | | | | |
| I-649 | 209 | 2.677 | 41 | | | | | |
| I-650 | 137 | 2.718 | 45 | | | | | |
| I-651 | 186 | 2.167 | 48 | | | | | |
| I-652 | 72 | 2.233 | 48 | | | | | |
| I-653 | 108 | 2.07 | 39 | | | | | |
| I-654 | 20 | 2.121 | 47 | | | | | |
| I-655 | 183 | 2.688 | 46 | | | | | |
| I-656 | 73 | 2.736 | 40 | | | | | |
| I-657 | 46 | 2.767 | 40 | | | | | |
| I-658 | 546 | 2.859 | 48 | | | | | |
| I-659 | 430 | 2.903 | 48 | | | | | |
| I-660 | 544 | 2.754 | 45 | | | | | |
| I-661 | 45 | 2.099 | 45 | | | | | |
| I-662 | 26 | 2.125 | 46 | | | | | |
| I-663 | 43 | 1.798 | 42 | | | | | |
| I-664 | 996 | 2.433 | 45 | | | | | |
| I-665 | 923 | 2.448 | 47 | | | | | |
| I-666 | 626 | 2.862 | | | | | | |
| I-667 | 585 | 2.88 | | | | | | |
| I-668 | 675 | 2.199 | | | | | | |
| I-669 | 451 | 2.25 | | | | | | |
| I-670 | 5000 | 2.16 | | | | | | |
| I-671 | 3138 | 2.25 | | | | | | |
| I-672 | 5000 | 1.896 | | | | | | |
| I-673 | 5000 | 1.872 | | | | | | |
| I-674 | 5000 | 1.949 | | | | | | |
| I-675 | 4525 | 2.127 | | | | | | |
| I-676 | 5000 | 2.287 | | | | | | |
| I-677 | 22 | 2.449 | 49 | | | | | |
| I-678 | 26 | 2.329 | 49 | | | | | |
| I-679 | 7 | 2.382 | 48 | 44.8 | | | | |
| I-680 | 32 | 2.215 | 47 | | | | | |
| I-681 | 12 | 2.273 | 48 | | | | | |
| I-682 | 41 | 2.409 | 47 | | | | | |
| I-683 | 19 | 2.44 | 37 | | | | | |
| I-684 | 15 | 2.037 | 44 | | | | | |
| I-685 | 25 | 2.1 | 44 | | | | | |
| I-686 | 5 | 1.997 | 46 | 48.3 | 7.5 | 11.2, 8.5 | 5.6 | |
| I-687 | 12 | 2.035 | 38 | | | | | |
| I-688 | 6 | 1.924 | 46 | | | | | |
| I-689 | 11 | 1.957 | 50 | | | | | |
| I-690 | 7 | 2.013 | 44 | | | | | |
| I-691 | 9 | 2.068 | 45 | | | | | |
| I-692 | 9 | 2.12 | 38 | | | | | |
| I-693 | 12 | 2.184 | 34 | | | | | |
| I-694 | 5 | 2.073 | 40 | 32.7 | | | | |
| I-695 | 5 | 2.117 | | | | | | |
| I-696 | 5 | 1.997 | 40 | 17 | | | | |
| I-697 | 5 | 2.093 | 21 | | | | | |
| I-698 | 5 | 2.153 | 43 | | | | | |
| I-699 | 43 | 2.633 | 50 | | | | | |
| I-700 | 49 | 2.607 | | | | | | |
| I-701 | 34 | 2.631 | 46 | | | | | |
| I-702 | 76 | 2.747 | 40 | | | | | |
| I-703 | 57 | 2.762 | 50 | | | 11.9 | | |
| I-704 | 49 | 2.745 | 42 | | 7.9 | | | |
| I-705 | 58 | 2.887 | 25 | | | | | |
| I-706 | 57 | 2.987 | 48 | | | | | |
| I-707 | 46 | 2.963 | 48 | | | | | |
| I-708 | 52 | 2.976 | 47 | | 11.5 | | | |
| I-709 | 54 | 3.114 | 10 | | | | | |
| I-710 | 73 | 2.143 | 45 | | | | | |
| I-711 | 88 | 2.132 | 48 | | | | | |
| I-712 | 92 | 2.778 | 42 | | | | | |
| I-713 | 70 | 2.851 | 48 | | | | | |
| I-714 | 131 | 2.698 | 43 | | | | | |
| I-715 | 60.5 | 2.762 | 25 | | | | | |
| I-716 | 91 | 2.622 | 50 | | | | | |
| I-717 | 39 | 2.694 | 35 | | | | | |
| I-718 | 82 | 2.765 | 38 | | | | | |
| I-719 | 38 | 2.818 | 28 | | | | | |
| I-720 | 75 | 2.665 | 33 | | | | | |
| I-721 | 46 | 2.722 | 28 | | | | | |
| I-722 | 1128 | 2.518 | 27 | | | | | |
| I-723 | 3833 | 2.583 | 29 | | | | | |
| I-724 | 114 | 2.42 | 34 | | | | | |
| I-725 | 5000 | 2.609 | 42 | | | | | |
| I-726 | 5000 | 2.338 | 43 | | | | | |
| I-727 | 5000 | 2.414 | 26 | | | | | |
| I-728 | 289 | 2.354 | 38 | | | | | |
| I-729 | 56 | 2.366 | | | | | | |
| I-730 | 35 | 2.377 | 44 | | | | | |
| I-731 | 34 | 2.335 | 48 | | | | | |
| I-732 | 4219 | 2.121 | | | | | | |
| I-733 | 4261 | 2.154 | 43 | | | | | |
| I-734 | 370 | 2.713 | | | | | | |
| I-735 | 246 | 2.738 | 43 | | | | | |
| I-736 | 440 | 2.722 | | | | | | |
| I-737 | 353 | 2.729 | 44 | | | | | |
| I-738 | 63 | 2.455 | 41 | | | | | |
| I-739 | 53 | 2.406 | 10 | | | | | |
| I-740 | 376 | 2.822 | | | | | | |
| I-741 | 226 | 2.915 | 10 | | | | | |
| I-742 | 159 | 2.804 | 27 | | | | | |
| I-743 | 85 | 2.604 | 29 | | | | | |
| I-744 | 112 | 2.557 | | | | | | |
| I-745 | 80 | 2.61 | 10 | | | | | |
| I-746 | 5000 | 2.372 | | | | | | |
| I-747 | 2388 | 2.492 | 15 | | | | | |
| I-748 | 54 | 2.459 | | | | | | |
| I-749 | 40 | 2.472 | 45 | | | | | |
| I-750 | 43 | 2.441 | 48 | | | | | |
| I-751 | 29 | 2.513 | 48 | | | | | |
| I-752 | 16 | 2.419 | | 53 | | 9.9 | | |
| I-753 | 14 | 2.432 | 50 | | | 10.0 | | |
| I-754 | 115 | 2.666 | | | | | | |
| I-755 | 88 | 2.684 | 47 | | | | | |
| I-756 | 56 | 2.606 | 49 | | | | | |
| I-757 | 64 | 2.546 | | | | | | |
| I-758 | 47 | 2.571 | 47 | | | | | |
| I-759 | 1534 | 2.582 | | | | | | |
| I-760 | 608 | 2.66 | −1 | | | | | |
| I-761 | 5 | 2.207 | 42 | 63.4 | 5.0 | | | |
| I-762 | 6 | 2.247 | 45 | | | 10.0 | 6.0 | |
| I-763 | 5 | 1.967 | | | | | | |
| I-764 | 14 | 2.212 | 45 | | | | | |
| I-765 | 228 | 1.71 | 49 | | | | | |
| I-766 | 55 | 1.853 | 50 | | | | | |
| I-767 | 12 | 2.004 | 50 | | | | | |
| I-768 | 9 | 2.043 | | | | | | |
| I-769 | 5 | 2.307 | | | | 13.0 | | |
| I-770 | 5 | 2.358 | | | | 13.7 | | |
| I-771 | 5 | 2.031 | | | | | | |
| I-772 | 7 | 2.069 | | | | | | |
| I-773 | 167 | 1.76 | 47 | | | | | |
| I-774 | 38 | 1.928 | 46 | | | | | |
| I-775 | 7 | 2.092 | 47 | 5.1 | | | | |
| I-776 | 5 | 2.137 | 41 | | | | | |
| I-777 | 5 | 2.155 | 50 | 24.5 | 14.4 | | | |
| I-778 | 8 | 2.035 | 43 | | | | | |
| I-779 | 5 | 2.124 | 44 | | | | | |
| I-780 | 9 | 2.081 | 50 | | 17.1 | | | |
| I-781 | 5 | 2.163 | 41 | 24 | 11.6 | | | |
| I-782 | 6 | 2.212 | 38 | | | | | |
| I-783 | 7 | 2.19 | 48 | 50.9 | 7.5 | | | |
| I-784 | 6 | 2.29 | 21 | 35.1 | 12.1 | | | |
| I-785 | 6 | 2.278 | 42 | 31 | | | | |
| I-786 | 8 | 2.298 | 39 | | 17.1 | | | |
| I-787 | 5 | 2.077 | 50 | | | | | |
| I-788 | 5 | 2.173 | 31 | | | | | |
| I-789 | 19 | 2.082 | 50 | 9.7 | | | | |
| I-790 | 24 | 2.125 | 50 | | | | | |
| I-791 | 310 | 2.054 | 48 | | | | | |
| I-792 | 20 | 1.963 | 33 | | | | | |
| I-793 | 14 | 2.387 | 10 | | | | | |
| I-794 | 19 | 2.378 | 40 | | | | | |
| I-795 | 176 | 2.387 | 10 | | | | | |
| I-796 | 8143 | 2.447 | 35 | | | | | |
| I-797 | 10000 | 2.321 | 45 | 4.3 | >20 | | | |
| I-798 | 106 | 2.068 | | | | | | |
| I-799 | 92 | 2.057 | | 0.9 | | | | |
| I-800 | 79 | 1.997 | | 8.1 | | | | |
| I-801 | 6 | 2.205 | 50 | | 6.8 | | | |
| I-802 | 6 | 2.301 | 10 | | | | | |
| I-803 | 5 | 2.03 | 40 | | 9.0 | | | |
| I-804 | 5 | 2.112 | 44 | | | | | |
| I-805 | 5 | 1.979 | 50 | | | | | |
| I-806 | 5 | 2.039 | 37 | | | | | |
| I-807 | 5 | 2.265 | 24 | | 5.3 | | 3.4 | |
| I-808 | 5 | 2.343 | 10 | | | | | |
| I-809 | 5 | 2.097 | 36 | | 11.7 | | | |
| I-810 | 6 | 2.165 | 39 | | | | | |
| I-811 | 32 | 1.684 | 43 | | | | | |
| I-812 | 33 | 1.897 | 47 | | | | | |
| I-813 | 7 | 2.166 | 28 | | | | | |
| I-814 | 7 | 2.096 | 47 | | 12.7 | | | |
| I-815 | 5 | 2.096 | 46 | | 11.8 | | | |
| I-816 | 5 | 2.052 | 46 | | | | | |
| I-817 | 10 | 2.233 | 47 | 45 | 6.8 | | | |
| I-818 | 6 | 2.117 | 48 | 31.4 | | | | |
| I-819 | 5 | 2.028 | 50 | 37.8 | | | | |
| I-820 | 6 | 2.095 | 38 | 30.8 | | | | |
| I-821 | 5 | 2.068 | 36 | | | | | |
| I-822 | 6 | 2.026 | 46 | 53 | 7.7 | | | |
| I-823 | 5 | 2.086 | 32 | 37.5 | >10 | | | |
| I-824 | 7 | 2.06 | 36 | | | | | |
| I-825 | 15 | 2.028 | | | | | | |
| I-826 | 15 | 2.066 | 30 | | | | | |
| I-827 | 13 | 2.1 | | | | | | |
| I-828 | 13 | 2.137 | 40 | | | | | |
| I-829 | 15 | 2.084 | 34 | | | | | |
| I-830 | 15 | 2.042 | | | | | | |
| I-831 | 11 | 2.075 | 50 | 32.4 | | | | |
| I-832 | 9 | 2.095 | | | | | | |
| I-833 | 8 | 2.146 | 50 | | | | | |
| I-834 | 14 | 2.08 | | | | | | |
| I-835 | 11 | 2.109 | 50 | 27.6 | | | | |
| I-836 | 11 | 2.22 | 41 | | | 16.9 | | |
| I-837 | 5 | 2.298 | 14 | | | 23.8 | | |
| I-838 | 12 | 2.186 | 41 | | | 17.4 | | |
| I-839 | 7 | 2.265 | 13 | | | 41.9 | | |
| I-840 | 16 | 2.191 | 32 | | | 22.3 | | |
| I-841 | 12 | 2.258 | 14 | | | 34.4 | | |
| I-842 | 34 | 2.392 | 10 | | | 47.9 | | |
| I-843 | 154 | 2.489 | 10 | | | | | |
| I-844 | 6 | 2.305 | 35 | | 10.7 | | | |
| I-845 | 7 | 2.417 | 10 | | | | | |
| I-846 | 35 | 2.415 | 18 | 4.3 | | | | |
| I-847 | 28 | 2.511 | 10 | | | | | |
| I-848 | 13 | 2.464 | | | | 7.0 | | |
| I-849 | 7 | 2.393 | | | 2.3 | 2.6 | | |
| I-850 | 26 | 2.261 | | | | 16.4 | | |
| I-851 | 16 | 2.147 | | | | 7.6 | | |
| I-852 | 7 | 2.397 | | | | 2.8 | | |
| I-853 | 8 | 2.515 | | | 6.6 | | | |
| I-854 | 8 | 2.48 | | | 4.6 | 3.6 | | |
| I-855 | 22 | 2.535 | | | | | | |
| I-856 | 17 | 2.453 | | | | | | |
| I-857 | 15 | 2.581 | 10 | | 50.6 | | | |
| I-858 | 34 | 2.543 | 18 | | | | | |
| I-859 | 36 | 2.711 | | | | | | |
| I-860 | 61 | 2.722 | 10 | | | | | |
| I-861 | 40 | 2.548 | 20 | | | | | |
| I-862 | 123 | 2.85 | 10 | | | | | |
| I-863 | 22 | 2.284 | 10 | | | | | |
| I-864 | 12 | 2.622 | 10 | | 29.1 | | | |
| I-865 | | 1.62 | 38 | | | | | |
| I-866 | | | 50 | | | | | |
| I-867 | | 1.802 | 13 | | | | | |
| I-868 | | 1.882 | 10 | | | | | |
| I-869 | | 1.912 | 10 | | | | | |
| I-870 | 9.5 | 1.99 | 47 | | | | | |
| I-871 | 5 | 1.917 | 45 | | | | | |
| I-872 | 9.5 | 1.893 | 50 | | | | | |
| I-873 | 6.5 | 1.995 | 47 | | 8.9 | | | |
| I-874 | 18.5 | 2.315 | 50 | | | | | |
| I-875 | 26 | 2.208 | −1 | | | | | |
| I-876 | 24 | 2.257 | 50 | | | | | |
| I-877 | 11 | 2.346 | 50 | | | | | |
| I-878 | 6 | 2.093 | 46 | | | | | |
| I-879 | 6 | 1.998 | 45 | | | | | |
| I-880 | 6 | 1.722 | 42 | | | | | |
| I-881 | 10 | −0.008 | — | | | | | |
| I-882 | 22 | 2.028 | — | | 22.5 | | | |
| I-883 | 53 | 2.397 | 42 | | | | | |
| I-884 | 14 | 2.112 | 34 | | | | | |
| I-885 | 32 | 2.39 | 43 | | | | | |
| I-886 | 22 | 1.506 | 43 | | | | | |
| I-887 | 14 | 1.373 | 46 | | | | | |
| I-888 | 13 | 1.391 | 21 | | | | | |
| I-889 | 16 | 1.486 | 41 | | | | | |
| I-890 | 16 | 1.668 | 40 | | | | | |
| I-891 | 13 | 1.526 | 42 | | | | | |
| I-892 | 18 | 1.475 | 33 | | | | | |
| I-893 | 834 | 1.759 | −1 | | | | | |
| I-894 | 15 | 1.451 | −1 | | | | | |
| I-895 | 14 | 1.448 | 31 | | | | | |
| I-896 | 22 | 1.446 | 30 | | | | | |
| I-897 | 16 | 1.653 | 43 | | | | | |
| I-898 | 16 | 2.201 | 42 | | | | | |
| I-899 | 28 | 2.263 | 40 | | | | | |
| I-900 | 33 | 2.743 | 41 | | | | | |
| I-901 | 38 | 2.492 | 40 | | | | | |
| I-902 | 104 | 2.688 | −1 | | | | | |
| I-903 | 33 | 2.383 | 43 | | | | | |
| I-904 | 54 | 2.646 | 30 | | | | | |
| I-905 | 8 | 1.921 | 46 | | | | | |
| I-906 | 8 | 1.75 | 46 | | >20 | | | |
| I-907 | 9 | 1.802 | 20 | | | | | |
| I-908 | 10 | 1.819 | 44 | | | | | |
| I-909 | 8 | 1.926 | 44 | | | | | |
| I-910 | 10 | 1.841 | 40 | | | | | |
| I-911 | 12 | 1.822 | −1 | | | | | |
| I-912 | 10 | 1.826 | 45 | | | | | |
| I-913 | 10 | 1.824 | 49 | | | | | |
| I-914 | 16 | 1.819 | 46 | | | | | |
| I-915 | 28 | 2.326 | 41 | | | | | |
| I-916 | 28 | 2.328 | 45 | | | | | |
| I-917 | 12 | 2.152 | 44 | | | | | |
| I-918 | 33 | 2.494 | 44 | | | | | |
| I-919 | 28 | 2.55 | 44 | | | | | |
| I-920 | 117 | 3.076 | 50 | | | | | |
| I-921 | 8 | 2.262 | 24 | | 4.0 | | | |
| I-922 | 12 | 2.344 | 32 | | 2.3 | 2.7 | | |
| I-923 | 27 | 2.462 | — | | | 6.0 | | |
| I-924 | 7 | 2.277 | — | | | 3.3 | 4.5 | |
| I-925 | 21 | 2.344 | — | | | | | |
| I-926 | 43 | 2.406 | — | | 17.1 | | | |
| I-927 | 11 | 2.313 | — | | | 8.2 | 4.2 | |
| I-928 | 21 | 2.38 | — | | 5.0 | | | |
| I-929 | 23 | 2.74 | — | | 7.0 | | | |
| I-930 | 37 | 2.962 | — | | 5.6 | | | |
| I-931 | 221 | 3.358 | — | | | | | |
| I-932 | 35 | 2.769 | — | | | 11.4 | | |
| I-933 | 168 | 3.026 | — | | >20 | | | |
| I-934 | 69 | 2.817 | — | | | | | |
| I-935 | 8 | 1.928 | — | | | | | |
| I-936 | 7 | 1.935 | — | | | | | |
| I-937 | 9 | 1.937 | — | | | | | |
| I-938 | 9 | 2.162 | — | | | | | |
| I-939 | 8 | 1.786 | 15 | | 18.0 | | | |
| I-940 | 1742 | 2.055 | 45 | | | | | |
| I-941 | 2111 | 2.011 | 46 | | | | | |
| I-942 | 1285 | 1.984 | 46 | | | | | |
| I-943 | 1994 | 2.071 | 49 | | | | | |
| I-944 | 761 | 1.982 | −1 | | | | | |
| I-945 | 1079 | 2.104 | −1 | | | | | |
| I-946 | 798 | 2.209 | 47 | | | | | |
| I-947 | 1053 | 2.271 | 47 | | | | | |
| I-948 | 2433 | 2.013 | 47 | | | | | |
| I-949 | 2256 | 2.086 | 49 | | | | | |
| I-950 | 1634 | 1.9 | 46 | | | | | |
| I-951 | 1471 | 1.971 | 47 | | | | | |
| I-952 | 1214 | 1.975 | −1 | | | | | |
| I-953 | 1456 | 2.04 | 47 | | | | | |
| I-954 | 900 | 1.918 | 46 | | | | | |
| I-955 | 1198 | 1.998 | 45 | | | | | |
| I-956 | 1086 | 1.875 | 46 | | | | | |
| I-957 | 1426 | −0.043 | 46 | | | | | |
| I-958 | 606 | 1.417 | 47 | | | | | |
| I-959 | 881 | −0.036 | 48 | | | | | |
| I-960 | 336 | 2.06 | 13 | | | | | |
| I-961 | 357 | 2.123 | 10 | | | | | |
| I-962 | 407 | 2.046 | −1 | | | | | |
| I-963 | 402 | 2.117 | −1 | | | | | |
| I-964 | 1435 | 1.802 | 46 | | | | | |
| I-965 | 1780 | 1.903 | 45 | | | | | |
| I-966 | 2023 | 1.791 | 43 | | | | | |
| I-967 | 1735 | 1.884 | 45 | | | | | |
| I-968 | 2981 | 1.752 | 30 | | | | | |
| I-969 | 2318 | 1.851 | 46 | | | | | |
| I-970 | 1364 | 1.853 | −1 | | | | | |
| I-971 | 1607 | 1.939 | 10 | | | | | |
| I-972 | 1819 | 1.879 | 30 | | | | | |
| I-973 | 1377 | 1.95 | 10 | | | | | |
| I-974 | 1780 | 1.857 | 10 | | | | | |
| I-975 | 1706 | 1.952 | 46 | | | | | |
| I-976 | 399 | 1.78 | 50 | | | | | |
| I-977 | 367 | 1.87 | 46 | | | | | |
| I-978 | 112 | 1.745 | −1 | | | | | |
| I-979 | 240 | 1.809 | −1 | | | | | |
| I-980 | 221 | 1.695 | 19 | | | | | |
| I-981 | 199 | 1.761 | 45 | | | | | |
| I-982 | 190 | 1.853 | 16 | | | | | |
| I-983 | 118 | 1.919 | 10 | | | | | |
| I-984 | 179 | 1.8 | 45 | | | | | |
| I-985 | 301 | 1.87 | 47 | | | | | |
| I-986 | 136 | 1.855 | 27 | | | | | |
| I-987 | 112 | 2.115 | 10 | | | | | |
| I-988 | 5 | 2.345 | 11 | | | 13.9 | 5.2 | |
| I-989 | 87 | 2.1 | 10 | | | | | |
| I-990 | 41 | 2.647 | 10 | | | 8.8 | | |
| I-991 | 51 | 2.696 | 10 | | | | | |
| I-992 | 59 | 2.561 | 12 | | | | | |
| I-993 | 12 | 2.334 | 41 | | | 4.0 | 4.4 | |
| I-994 | 121 | 3.205 | 10 | | | | | |
| I-995 | 55 | 2.799 | 34 | | | | | |
| I-996 | 21 | 2.839 | 48 | | | 11.3 | 10.8 | |
| I-997 | 154 | 3.415 | 10 | | | | | |
| I-998 | 127 | 2.87 | 43 | | | | | |
| I-999 | 26 | 2.941 | 30 | | | 26.3 | 11.1 | |
| I-1000 | 18 | 2.967 | 44 | | | 23.9 | 8.0 | |
| I-1001 | 5526 | 1.886 | −1 | | | >>20 | >>20 | |
| I-1002 | 9 | 2.605 | −1 | | | 29.8 | >>20 | |
| I-1003 | 38 | 2.543 | 10 | | | | | |
| I-1004 | 5 | 1.996 | 47 | | | 10.6 | >20 | |
| I-1005 | 42 | 2.641 | 10 | | | | | |
| I-1006 | 5 | 1.703 | 30 | | | >20 | | |
| I-1007 | 6 | 2.449 | 18 | | | 24.9 | 3.3 | |
| I-1008 | 9 | 2.431 | 34 | | | 14.0 | 13.0 | |
| I-1009 | 11 | 2.038 | −1 | | | 33.3 | | |
| I-1010 | 8 | 2.356 | −1 | | | 13.3 | | |
| I-1011 | 5 | 2.034 | 23 | | | 20.8 | >20 | |
| I-1012 | 60 | 2.61 | 10 | | | | | |
| I-1013 | 8 | 2.133 | 47 | | | | | |
| I-1014 | 19 | 2.38 | 10 | | | | | |
| I-1015 | 5 | 2.27 | 47 | | | 8.9 | 9.0 | |
| I-1016 | 8 | 2.38 | 10 | | | 21.4 | 21.4 | |
| I-1017 | 5 | 2.113 | 48 | | | 8.9 | >20 | |
| I-1018 | 26 | 2.347 | 10 | | | | | |
| I-1019 | 5 | 2.219 | 48 | | | 9.6 | 8.3 | |
| I-1020 | 52 | 2.488 | 10 | | | | | |
| I-1021 | 5 | 2.049 | 44 | | | 11.5 | | |
| I-1022 | 33 | 2.285 | 20 | | | | | |
| I-1023 | 10 | 2.175 | 46 | | | | | |
| I-1024 | 43 | 2.449 | 14 | | | | | |
| I-1025 | 5 | | | | | 23.6 | >20 | |
| I-1026 | 5 | | | | | 16.7 | >20 | |
| I-1027 | 1140 | | | | | | | |
| I-1028 | 13 | 2.402 | 10 | | | 8.7 | 6.4 | |
| I-1029 | 823 | 2.36 | 49 | | | >20 | >20 | |
| I-1030 | 507 | 2.757 | 47 | | | >20 | >20 | |
| I-1031 | 11 | 2.42 | 47 | | | 8.8 | | |
| I-1032 | 15 | 2.431 | 44 | | | | | |
| I-1033 | 10 | 2.504 | 34 | | | | | |
| I-1034 | 27 | 2.709 | 12 | | | 9.5 | 11.9 | |
| I-1035 | 21 | 2.629 | 28 | | | 10.2 | >20 | |
| I-1036 | 29 | 2.46 | −1 | | | | | |
| I-1037 | 30 | 2.521 | −1 | | | | | |
| I-1038 | 101 | 2.729 | 10 | | | | | |
| I-1039 | 57 | 2.654 | 20 | | | | | |
| I-1040 | 8 | 2.268 | 50 | | | 9.3 | | |
| I-1041 | 8 | 2.084 | 50 | | | >>20 | | |
| I-1042 | 5 | 2.354 | 46 | | | | | |
| I-1043 | 12 | 2.148 | 43 | | | | | |
| I-1044 | 5 | 2.318 | 43 | | | 17.6 | 20.0 | |
| I-1045 | 5 | 2.117 | 49 | | | 23.9 | | |
| I-1046 | 5 | 2.398 | 37 | | | 20.5 | | |
| I-1047 | 5 | 2.193 | 10 | | | 28.4 | | |
| I-1048 | 5 | 2.517 | 42 | | | 8.8 | 10.5 | |
| I-1049 | 6 | 2.285 | 48 | | | | | |
| I-1050 | 5 | 2.446 | 43 | | | 24.8 | 11.2 | |
| I-1051 | 14 | 2.228 | 48 | | | >>20 | >>20 | |
| I-1052 | 9 | 2.334 | 33 | | | | | |
| I-1053 | 11 | 2.381 | 48 | | | >20 | | |
| I-1054 | 5 | 2.186 | 46 | | | >20 | | |
| I-1055 | 7 | 2.113 | 10 | | | | | |
| I-1056 | 6494 | 1.929 | 41 | | | | | |
| I-1057 | 6641 | 1.92 | 50 | | | | | |
| I-1058 | 14 | 2.249 | 42 | | | | | |
| I-1059 | 42 | 2.444 | 42 | | | | | |
| I-1060 | 38 | 2.602 | 10 | | | | | |
| I-1061 | 6 | 2.562 | 10 | | | 10.3 | | |
| I-1062 | 393 | 1.898 | −1 | | | | | |
| I-1063 | 471 | 1.644 | 43 | | | | | |
| I-1064 | 414 | 1.967 | 29 | | | | | |
| I-1065 | 520 | 2.044 | −1 | | | | | |
| I-1066 | 789 | 2.024 | 10 | | | | | |
| I-1067 | 517 | 2.147 | −1 | | | | | |
| I-1068 | 950 | 2.053 | 13 | | | | | |
| I-1069 | 920 | 2.113 | 10 | | | | | |
| I-1070 | 1022 | 2.135 | 10 | | | | | |
| I-1071 | 1261 | 2.218 | 33 | | | | | |
| I-1072 | 723 | 1.389 | 35 | | | | | |
| I-1073 | 409 | 1.831 | 31 | | | | | |
| I-1074 | 498 | 1.92 | 34 | | | | | |
| I-1075 | 567 | 1.971 | 17 | | | | | |
| I-1076 | 448 | 2.049 | −1 | | | | | |
| I-1077 | 324 | 2.06 | 10 | | | | | |
| I-1078 | 352 | 2.162 | 27 | | | | | |
| I-1079 | 5 | 2.498 | 45 | | | 19.7 | 14.5 | |
| I-1080 | 6 | 2.593 | 47 | | | >20 | 17.2 | |
| I-1081 | 5 | 2.398 | 43 | | | 16.7 | 10.0 | |
| I-1082 | 5 | 2.331 | 48 | | | 14.1 | 4.8 | |
| I-1083 | 8 | | | | | 18.8 | | |
| I-1084 | 368 | | | | | | | |
| I-1085 | 390 | 3.702 | 10 | | | | | |
| I-1086 | 12 | 2.709 | −1 | | | | | |
| I-1087 | 9 | 2.766 | 44 | | | 9.3 | >20 | |
| I-1088 | 22 | 2.8 | 44 | | | | | |
| I-1089 | 12 | 2.826 | 43 | | | | | |
| I-1090 | 18 | 2.982 | 39 | | | | | |
| I-1091 | 27 | 3.042 | 33 | | | | | |
| I-1092 | 26 | 3.173 | 28 | | | | | |
| I-1093 | 43 | 3.22 | 48 | | | | | |
| I-1094 | 46 | 3.271 | −1 | | | | | |
| I-1095 | 15 | 3.089 | −1 | | | >20 | >20 | |
| I-1096 | 17 | 3.18 | 10 | | | | | |
| I-1097 | 40 | 3.611 | 20 | | | >20 | >20 | |
| I-1098 | 100 | 3.538 | 10 | | | | | |
| I-1099 | 9 | 2.16 | 47 | | | 9.0 | | |
| I-1100 | 16 | 2.357 | 46 | | | | | |
| I-1101 | 14 | 2.216 | 48 | | | | | |
| I-1102 | 16 | 2.394 | 10 | | | | | |
| I-1103 | 15 | 2.18 | 46 | | | | | |
| I-1104 | 10 | 2.383 | 48 | | | | | |
| I-1105 | 36 | 2.328 | 48 | | | >20 | | |
| I-1106 | 23 | 2.439 | 47 | | | >20 | | |
| I-1107 | 18 | 2.637 | 10 | | | | | |
| I-1108 | 18 | 2.288 | 42 | | | | | |
| I-1109 | 24 | 2.308 | 45 | | | | | |
| I-1110 | 38 | 2.37 | 10 | | | | | |
| I-1111 | 28 | 2.357 | 10 | | | | | |
| I-1112 | 40 | 2.719 | 10 | | | | | |
| I-1113 | 64 | 2.986 | 10 | | | | | |
| I-1114 | 20 | 2.492 | 28 | | | | | |
| I-1115 | 28 | 2.503 | 32 | | | | | |
| I-1116 | 40 | 2.62 | 13 | | | | | |
| I-1117 | 55 | 2.611 | 10 | | | | | |
| I-1118 | 24 | 2.341 | 37 | | | | | |
| I-1119 | 26 | 2.507 | 31 | | | | | |
| I-1120 | 85 | 2.544 | 41 | | | | | |
| I-1121 | 18 | 2.306 | 41 | | | | | |
| I-1122 | 34 | 2.412 | 14 | | | | | |
| I-1123 | 64 | 2.465 | 12 | | | | | |
| I-1124 | 12 | 2.222 | 47 | | | >20 | | |
| I-1125 | 16 | 2.394 | 45 | | | >20 | | |
| I-1126 | 32 | 2.419 | 49 | | | | | |
| I-1127 | 18 | 2.183 | 47 | | | | | |
| I-1128 | 20 | 2.297 | 23 | | | | | |
| I-1129 | 39 | 2.335 | 29 | | | | | |
| I-1130 | 6 | | 15 | | | 7.6 | | |
| I-1131 | 7 | | 39 | | | 18.8 | | |
| I-1132 | 21 | | 49 | | | >>20 | | |
| I-1133 | 5 | | −1 | | | | | |
| I-1134 | 6 | | | | | | | |
| I-1135 | 20 | | 39 | | | | | |
| I-1136 | 16 | | 40 | | | 14.9 | | |
| I-1137 | 8 | | −1 | | | 12.0 | | |
| I-1138 | 18 | | −1 | | | 19.8 | | |
| I-1139 | 22 | | −1 | | | 18.0 | | |
| I-1140 | 33 | | 10 | | | | | |
| I-1141 | 13 | | 44 | | | | | |
| I-1142 | 22 | | 46 | | | | | |
| I-1143 | 12 | | 44 | | | | | |
| I-1144 | 28 | | 32 | | | | | |
| I-1145 | 18 | | 10 | | | | | |
| I-1146 | 33 | | 18 | | | | | |
| I-1147 | 10 | | 23 | | | | | |
| I-1148 | 50 | | 10 | | | | | |
| I-1149 | 70 | | 10 | | | | | |
| I-1150 | 12 | | 18 | | | | | |
| I-1151 | 30 | | 10 | | | | | |
| I-1152 | 65 | | 10 | | | | | |
| I-1153 | 12 | | −1 | | | | | |
| I-1154 | 45 | | −1 | | | | | |
| I-1155 | 60 | | −1 | | | | | |
| I-1156 | 14 | | 48 | | | | | |
| I-1157 | 36 | | 15 | | | | | |
| I-1158 | 168 | | 29 | | | | | |
| I-1159 | 61 | 1.876 | 45 | | | | | |
| I-1160 | 575 | 1.406 | −1 | | | | | |
| I-1161 | 24 | 2.076 | −1 | | | >20 | | |
| I-1162 | 1534 | | −1 | | | | | |
| I-1163 | 691 | 2.059 | 48 | | | | | |
| I-1164 | 162 | 2.13 | 50 | | | | | |
| I-1165 | 722 | | −1 | | | | | |
| I-1166 | 14 | | 14 | | | 14.6 | | |
| I-1167 | 34 | | 10 | | | 11.7 | | |
| I-1168 | 25 | | 10 | | | | | |
| I-1169 | 159 | | 10 | | | | | |
| I-1170 | 15 | | 10 | | | 13.5 | | |
| I-1171 | 70 | | −1 | | | | | |
| I-1172 | 45 | | −1 | | | | | |
| I-1173 | 12 | | 10 | | | 17.2 | | |
| I-1174 | 43 | | 10 | | | | | |
| I-1175 | 24 | | 10 | | | | | |
| I-1176 | 169 | | 10 | | | | | |
| I-1177 | 25 | | 35 | | | 4.3 | | |
| I-1178 | 54.5 | | −1 | | | | | |
| I-1179 | 346 | | 44 | | | | | |
| I-1180 | 87 | | 31 | | | | | |
| I-1181 | 225.5 | | 50 | | | | | |
| I-1182 | 144.5 | | 48 | | | | | |
| I-1183 | 409 | | 50 | | | | | |
| I-1184 | 175.5 | | 45 | | | | | |
| I-1185 | 203 | | 33 | | | | | |
| I-1186 | 127.5 | | 46 | | | | | |
| I-1187 | 80.5 | | 42 | | | | | |
| I-1188 | 22.5 | | 18 | | | 7.2 | | |
| I-1189 | 94.5 | | 10 | | | | | |
| I-1190 | 58.5 | | 10 | | | | | |
| I-1191 | 38.5 | | 10 | | | | | |
| I-1192 | 81.5 | | 10 | | | | | |
| I-1193 | 78.5 | | 10 | | | | | |
| I-1194 | 66.5 | | 10 | | | | | |
| I-1195 | 29.5 | | 10 | | | 16.2 | | |
| I-1196 | 85 | | 10 | | | | | |
| I-1197 | 44 | | 10 | | | | | |
| I-1198 | 65 | | 47 | | | | | |
| I-1199 | 44.5 | | 19 | | | | | |
| I-1200 | 99 | | 48 | | | | | |
| I-1201 | 13 | | 47 | | | | | |
| I-1202 | 16 | | 50 | | | | | |
| I-1203 | 16 | | 50 | | | 10.0 | | |
| I-1204 | 81 | | 50 | | | | | |
| I-1205 | 987 | | 50 | | | | | |
| I-1206 | 32 | | 50 | | | 27.8 | | |
| I-1207 | 40 | | 11 | | | 7.5 | | |
| I-1208 | 349 | | 44 | | | | | |
| I-1209 | 479 | | 16 | | | | | |
| I-1210 | 56 | | 50 | | | | | |
| I-1211 | 115 | | 11 | | | | | |
| I-1212 | 8663 | | −1 | | | | | |
| I-1213 | 10000 | | −1 | | | | | |
| I-1214 | 116 | | 50 | | | | | |
| I-1215 | 216 | | 10 | | | | | |
| I-1216 | 10000 | | 10 | | | | | |
| I-1217 | 10000 | | 15 | | | | | |
| I-1218 | 10 | | | | | >20 | | |
| I-1219 | 7 | | | | | >20 | | |
| I-1220 | 11 | | | | | 17.3 | | |
| I-1221 | 14 | | | | | 23.4 | | |
| I-1222 | 511 | | | | | | | |
| I-1223 | 550 | | | | | | | |
| I-1224 | 389 | | | | | | | |
| I-1225 | 305 | | | | | | | |
| I-1226 | 559 | | | | | | | |
| I-1227 | 10000 | | | | | | | |
| I-1228 | 100 | | | | | | | |
| I-1229 | 134 | | | | | | | |
| I-1230 | 10000 | | | | | | | |
| I-1231 | 10000 | | | | | | | |
| I-1232 | 31 | | | | | | | |
| I-1233 | 24 | | | | | | | |
| I-1234 | 41 | | | | | | | |
| I-1235 | 27 | | | | | | | |
| I-1236 | 69 | | | | | | | |
| I-1237 | 31 | | | | | | | |
| I-1238 | 44 | | | | | | | |
| I-1239 | 33 | | | | | | | |
| I-1240 | 33 | | | | | 11.5 | 4.9 | |
| I-1241 | 19 | | | | | 15.7 | 3.8 | |
| I-1242 | 30 | | | | | >>20 | 4.8 | |
| I-1243 | 82 | | | | | | | |
| I-1244 | 18 | | | | | 17.7 | 13.9 | |
| I-1245 | 9 | | | | | 12.2 | 7.3 | |
| I-1246 | 13 | | | | | 24.3 | 15.9 | |
| I-1247 | 33 | | | | | >20 | >20 | |
| I-1248 | 19 | | | | | 29.7 | | |
| I-1249 | 17 | | | | | 25.2 | | |
| I-1250 | 31 | | | | | >20 | | |
| I-1251 | 1940 | | | | | | | |
| I-1252 | 546 | | 44 | | | | | |
| I-1253 | 14 | | 42 | | | >20 | | |
| I-1254 | 530 | | −1 | | | | | |
| I-1255 | 32 | | 50 | | | | | |
| I-1256 | 1466 | | | | | | | |
| I-1257 | 11 | | | | | | | |
| I-1258 | 17 | | −1 | | | >20 | | |
| I-1259 | 10 | | −1 | | | 18.1 | | |
| I-1260 | 23 | | 50 | | | | | |
| I-1261 | 31 | | 50 | | | | | |
| I-1262 | 1124 | | 49 | | | | | |
| I-1263 | 43 | | 12 | | | 20.0 | | |
| I-1264 | 157 | | 10 | | | | | |
| I-1265 | 152 | | 10 | | | | | |
| I-1266 | 755 | | 10 | | | | | |
| I-1267 | 181 | | 10 | | | | | |
| I-1268 | 198 | | −1 | | | | | |
| I-1269 | 173 | | 10 | | | | | |
| I-1270 | 3699 | | 10 | | | | | |
| I-1271 | 682 | | 10 | | | | | |
| I-1272 | 331 | | 21 | | | | | |
| I-1273 | 9 | | 32 | | | >20 | | |
| I-1274 | 13 | | 10 | | | >20 | | |
| I-1275 | 9 | | −1 | | | 27.8 | | |
| I-1276 | 10 | | −1 | | | >20 | | |
| I-1277 | 17 | | −1 | | | >20 | | |
| I-1278 | 10 | | 25 | | | 18.0 | | |
| I-1279 | 12 | | 14 | | | 22.9 | | |
| I-1280 | 22 | | 10 | | | 24.7 | | |
| I-1281 | 10 | | 14 | | | | | |
| I-1282 | 34 | | 24 | | | | | |
| I-1283 | 26 | | 10 | | | | | |
| I-1284 | 10000 | | 10 | | | | | |
| I-1285 | 10000 | | 10 | | | | | |
| I-1286 | 10000 | | 10 | | | | | |
| I-1287 | 10000 | | 10 | | | | | |
| I-1288 | 1164 | | 10 | | | | | |
| I-1289 | 10000 | | 10 | | | | | |
| I-1290 | 10000 | | 10 | | | | | |
| I-1291 | 10000 | | 10 | | | | | |
| I-1292 | 10000 | | 10 | | | | | |
| I-1293 | 10000 | | −1 | | | | | |
| I-1294 | 10000 | | 10 | | | | | |
| I-1295 | 10000 | | 10 | | | | | |
| I-1296 | 3785 | | 10 | | | | | |
| I-1297 | 10000 | | −1 | | | | | |
| I-1298 | 10000 | | 10 | | | | | |
| I-1299 | 10000 | | 10 | | | | | |
| I-1300 | 10000 | | 10 | | | | | |
| I-1301 | 10000 | | −1 | | | | | |
| I-1302 | 45 | | −1 | | | | | |
| I-1303 | 86 | | 28 | | | | | |
| I-1304 | 31 | | 10 | | | | | |
| I-1305 | 6 | | 49 | | | 9.7 | | |
| I-1306 | 6 | | 50 | | | 6.6 | | |
| I-1307 | 21 | | 20 | | | | | |
| I-1308 | 25 | | 47 | | | | | |
| I-1309 | 59 | | 10 | | | | | |
| I-1310 | 124 | | 10 | | | | | |
| I-1311 | 38 | | 10 | | | | | |
| I-1312 | 14 | | 46 | | | | | |
| I-1313 | 12 | | 10 | | | | | |
| I-1314 | 9 | | 48 | | | >>20 | | |
| I-1315 | 13 | | 10 | | | 7.2 | | |
| I-1316 | 11 | | 48 | | | 6.8 | | |
| I-1317 | 9 | | 49 | | | 9.7 | | |
| I-1318 | 14 | | −1 | | | 4.8 | | |
| I-1319 | 10 | | 10 | | | 4.2 | | |
| I-1320 | 10 | | 44 | | | 26.2 | | |
| I-1321 | 8 | | 48 | | | 10.9 | | |
| I-1322 | 11 | | 33 | | | 9.1 | | |
| I-1323 | 6 | | 48 | | | 11.7 | | |
| I-1324 | 14 | | 25 | | | 5.8 | | |
| I-1325 | 14 | | 12 | | | 5.7 | | |
| I-1326 | 12 | | −1 | | | 6.2 | | |
| I-1327 | 13 | | 39 | | | 7.0 | | |
| I-1328 | 11 | | 26 | | | 5.4 | | |
| I-1329 | 23 | | 45 | | | 35.0 | | |
| I-1330 | 104 | | −1 | | | | | |
| I-1331 | 75 | | 10 | | | | | |
| I-1332 | 11 | | 13 | | | 2.5 | | |
| I-1333 | 20 | | 10 | | | 2.8 | | |
| I-1334 | 30 | | 10 | | | 4.2 | | |
| I-1335 | 13 | | 11 | | | 2.3 | | |
| I-1336 | 29 | | 10 | | | 2.7 | | |
| I-1337 | 85 | | 10 | | | 6.2 | | |
| I-1338 | 10 | | 10 | | | 3.6 | | |
| I-1339 | 33 | | 10 | | | 5.2 | | |
| I-1340 | 159 | | 10 | | | 6.8 | | |
| I-1341 | 17 | | −1 | | | 3.5 | | |
| I-1342 | 35 | | −1 | | | 7.0 | | |
| I-1343 | 150 | | 10 | | | | | |
| I-1344 | 11 | | 44 | | | 4.1 | | |
| I-1345 | 15 | | 37 | | | 4.7 | | |
| I-1346 | 2319 | | 50 | | | | | |
| I-1347 | 2369 | | −1 | | | | | |
| I-1348 | 1181 | | −1 | | | | | |
| I-1349 | 161 | | −1 | | | | | |
| I-1350 | 158 | | 28 | | | | | |
| I-1351 | 258 | | 14 | | | | | |
| I-1352 | 12 | | 50 | | | 19.5 | | |
| I-1353 | 18 | | 44 | | | 8.8 | | |
| I-1354 | 48 | | −1 | | | | | |
| I-1355 | 213 | | | | | | | |
| I-1356 | 23 | | 48 | | | >>20 | | |
| I-1357 | 10 | | 48 | | | 33.6 | | |
| I-1358 | 19 | | 10 | | | | | |
| I-1359 | 88 | | 34 | | | | | |
| I-1360 | 135 | | −1 | | | | | |
| I-1361 | 39 | | −1 | | | | | |
| I-1362 | 23 | | −1 | | | | | |
| I-1363 | 9 | | 12 | | | 5.5 | | |
| I-1364 | 9 | | 17 | | | | | |
| I-1365 | 9 | | 22 | | | | | |
| I-1366 | 7 | | 10 | | | | | |
| I-1367 | 31 | | 10 | | | | | |
| I-1368 | 44 | | 10 | | | | | |
| I-1369 | 29 | | 10 | | | | | |
| I-1370 | 18 | | 10 | | | | | |
| I-1371 | 22 | | 10 | | | | | |
| I-1372 | 29 | | 10 | | | | | |
| I-1373 | 5 | | 50 | | | | | |
| I-1374 | 17 | | 10 | | | 8.8 | | |
| I-1375 | 7 | | 50 | | | | | |
| I-1376 | 4208 | | 10 | | | | | |
| I-1377 | 1003 | | 10 | | | | | |
| I-1378 | 6171 | | 10 | | | | | |
| I-1379 | 1435 | | 10 | | | | | |
| I-1380 | 10000 | | 10 | | | | | |
| I-1381 | 10000 | | 10 | | | | | |
| I-1382 | 2853 | | 10 | | | | | |
| I-1383 | 1655 | | 10 | | | | | |
| I-1384 | 10000 | | 10 | | | | | |
| I-1385 | 1082 | | 10 | | | | | |
| I-1386 | 2248 | | 10 | | | | | |
| I-1387 | 6938 | | 10 | | | | | |
| I-1388 | 18 | | | | | | | |
| I-1389 | 9 | | | | | | | |
| I-1390 | 16 | | | | | | | |
| I-1391 | 11 | | | | | | | |
| I-1392 | 13 | | | | | | | |
| I-1393 | 34 | | | | | | | |
| I-1394 | 9 | | | | | | | |
| I-1395 | 33 | | | | | | | |
| I-1396 | 33 | | | | | | | |
| I-1397 | 48 | | | | | | | |
| I-1398 | 73 | | | | | | | |
| I-1399 | 13 | | | | | | | |
| I-1400 | 5 | | | | | | | |
| I-1401 | 5 | | | | | | | |
| I-1402 | 9 | | | | | | | |
| I-1403 | 6 | | | | | | | |
| I-1404 | 113 | | | | | | | |
| I-1405 | 9 | | | | | | | |
| I-1406 | 6 | | | | | | | |
| I-1407 | 5 | | | | | | | |
| I-1408 | 33 | | | | | | | |
| I-1409 | 74 | | | | | | | |
| I-1410 | 80 | | | | | | | |
| I-1411 | 109 | | | | | | | |
| I-1412 | 79 | | | | | | | |
| I-1413 | 74 | | | | | | | |
| I-1414 | 84 | | | | | | | |
| I-1415 | 72 | | | | | | | |
| I-1416 | 57 | | | | | | | |
| I-1417 | 198 | | | | | | | |
| I-1418 | 106 | | | | | | | |
| I-1419 | 152 | | | | | | | |
| I-1420 | 124 | | | | | | | |
| I-1421 | 134 | | | | | | | |
| I-1422 | 388 | | | | | | | |
| I-1423 | 389 | | | | | | | |
| I-1424 | 235 | | | | | | | |
| I-1425 | 239 | | | | | | | |
| I-1426 | 203 | | | | | | | |
| I-1427 | 33 | | | | | | | |
| I-1428 | 41 | | | | | | | |
| I-1429 | 10000 | | | | | | | |
| I-1430 | 10000 | | | | | | | |
| I-1431 | 34 | | | | | | | |
| I-1432 | 27 | | | | | | | |
| I-1433 | 71 | | | | | | | |
| I-1434 | 83 | | | | | | | |
| I-1435 | 90 | | | | | | | |
| I-1436 | 121 | | | | | | | |
| I-1437 | 7 | | | | | | | |
| I-1438 | 5 | | | | | | | |
| I-1439 | 349 | | | | | | | |
| I-1440 | 26 | | | | | | | |
| I-1441 | 327 | | | | | | | |
| I-1442 | 1500 | | | | | | | |
| I-1443 | 24 | | | | | | | |
| I-1444 | 6558 | | | | | | | |
| I-1445 | 13 | | | | | | | |
| I-1446 | 9 | | | | | | | |
| I-1447 | 11 | | | | | | | |
| I-1448 | 20 | | | | | | | |
| I-1449 | 16 | | | | | | | |
| I-1450 | 11 | | | | | | | |
| I-1451 | 13 | | | | | | | |
| I-1452 | 66 | | | | | | | |
| I-1453 | 52 | | | | | | | |
| I-1454 | 22 | | | | | | | |
| I-1455 | 13 | | | | | | | |
| I-1456 | 16 | | | | | | | |
| I-1457 | 43 | | | | | | | |

[2616] COLO320DM proliferation assay IC50: In some embodiments, inhibition of cell proliferation by provided technologies were assessed using cell lines related to or from certain conditions, disorders or diseases. In some embodiments, cell proliferation was assessed in COLO320DM cells. In some embodiments, assessment was performed using the following procedure: On Day 1, cultured COLO320DM cells in a T75 flask were trypsinized in 3 mL of 0.25% trypsin/EDTA for 5 min and quenched with 10 mL RPMI-1640+4% HI FBS assay media. The cells were spun down at 1200 rpm for 5 min, the cell pellet collected and re-suspended at 5000 cells/mL in assay media. Using a Combi liquid handler, cells were dispensed (50 uL, 250 cells/well) into three 384 well plates. Plates were incubated at 37° C., 500 CO2 for 18-22 h. On day 2, compounds were added. A liquid handling system was used to prepare the compound dilution and dispense compound into assay plates. The compounds were serially diluted 1/2 in 90% DMSO to create a 7 point dose curve. From compound plate, 100 nL of compound were dispensed directly into wells of the assay plates to create a dose curve starting at 20 uM and ending at 313 nM. Assay plates were incubated at 37° C., 500 CO2 for 96 h. On day 6, assay plates were removed from the incubator and allowed to sit at room temperature for 30 min. Using a liquid handler, 20 uL of CellTiter Glo reagent was added to each well. The assay plates were shaken for 2 min and allowed to sit on the bench for 10-15 minutes. The assay plates were read using the CellTiter Glo protocol on a GloMax microplate reader, and the data analyzed using GraphPad Prism. Activities of various agents, including various stapled peptides in Table E2, were confirmed. Certain results are presented in Table E2-1 below.

[2617] Table E2-1. Certain data of various peptide compositions.
[2618] Structural information are described in Table E3. Compositions of stapled peptides.
[2619] 1. Compound ID
[2620] 2. beta-Catenin FP IC50 (nM)
[2621] 3. NanoBRET Abs IC50 (uM)
[2622] 4. DLD1 4% Abs IC50 (uM)
[2623] 5. COLO320DM Proliferation Abs IC50 (uM)
[2624] 6. Calculated Mass
[2625] 7. Found m/z (positive mode)
[2626] 8. Found m/z (negative mode)
[2627] 9. C═C double bond (e.g., —CH═CH—) conversion. A: —CH═CH— in each staple reduced to —CH₂—CH₂—; B: —CH═CH— in N-terminal side staple converted to an epoxide moiety

[chemical structure]

| 1 | 2 | 3 | 4 | 5 | 6 | 7 | 8 | 9 |
|---|---|---|---|---|---|---|---|---|
| I-1 | | | | | 1822.857 | | | |
| I-2 | | | | | 1822.857 | | | |
| I-3 | | | | | 1834.857 | 918.8 | 1834.2 | |
| I-4 | | | | | 1834.857 | 918.8 | 1834.2 | |
| I-5 | | | | | 1848.872 | 925.8 | 1848.2 | |
| I-6 | | | | | 1848.872 | 925.8 | 1848.2 | |
| I-7 | | | | | 1896.872 | 949.8 | 1896.2 | |
| I-8 | | | | | 1896.872 | 949.8 | 1896.2 | |
| I-9 | | | | | 1853.878 | 1855.5 | 1853.2 | |
| I-10 | | | | | 1853.878 | 1855.6 | 1853.2 | |
| I-11 | | | | | 1928.914 | 1952.5 | 1928.2 | |
| I-12 | | | | | 1928.914 | 1952.6 | 1928.2 | |
| I-13 | | | | | 1818.898 | 1842.4 | 1818.2 | |
| I-14 | | | | | 1818.898 | 1842.5 | 1818.2 | |
| I-15 | | | | | 1858.929 | 1882.5 | 1858.2 | |
| I-16 | | | | | 1858.929 | 1882.5 | 1858.2 | |
| I-17 | | | | | 1832.914 | 1856.5 | 1832.2 | |
| I-18 | | | | | 1832.914 | 1856.5 | 1832.2 | |
| I-19 | | | | | 1864.831 | 1888.4 | 1864.1 | |
| I-20 | | | | | 1864.831 | 1888.4 | 1864.1 | |
| I-21 | | | | | 1878.846 | 1902.4 | 1878.2 | |
| I-22 | | | | | 1878.846 | 1902.4 | 1878.2 | |
| I-23 | | | | | 1892.862 | 1916.4 | 1892.2 | |
| I-24 | | | | | 1892.862 | 1916.4 | 1892.2 | |
| I-25 | | | | | 1808.841 | 1810.4 | 1808.1 | |
| I-26 | | | | | 1822.857 | 1824.4 | 1822.1 | |
| I-27 | | | | | 1808.841 | 1810.4 | 1808.1 | |
| I-28 | | | | | 1822.857 | 1824.4 | 1822.1 | |
| I-29 | | | | | 1822.857 | 1829.3 | 1805 | |
| I-30 | | | | | 1806.825 | 1808.3 | 1806.1 | |
| I-31 | | | | | 1806.825 | 1830.3 | 1806.1 | |
| I-32 | | | | | 1792.81 | 1794.3 | 1792 | |
| I-33 | | | | | 1792.81 | 1794.3 | 1792 | |
| I-34 | | | | | 1822.857 | 1824.3 | 1822.1 | |
| I-35 | | | | | 1806.825 | 1830.2 | 1806 | |
| I-36 | | | | | 1794.825 | 1818.3 | 1794 | |
| I-37 | | | | | 1794.825 | 1796.3 | 1794 | |
| I-38 | | | | | 1792.81 | 1816.3 | 1792 | |
| I-39 | | | | | 1806.825 | 1808.3 | 1806.1 | |
| I-40 | | | | | 1806.825 | 1808.3 | 1806.1 | |
| I-41 | | | | | 1780.81 | 1782.3 | 1780 | |
| I-42 | | | | | 1780.81 | 1782.3 | 1780 | |
| I-43 | | | | | 1822.857 | 1824.3 | 1822 | |
| I-44 | | | | | 1822.857 | 1824.4 | 1822 | |
| I-45 | | | | | 1808.841 | 1810.3 | 1808 | |
| I-46 | | | | | 1808.841 | 1810.3 | 1808 | |
| I-47 | | | | | 1735.825 | 1737.3 | 1735 | |
| I-48 | | | | | 1735.825 | 1737.3 | 1735 | |
| I-49 | | | | | 1794.825 | 1796.3 | 1794 | |
| I-50 | | | | | 1794.825 | 1796.3 | 1794 | |
| I-51 | | | | | 1792.81 | 1794.3 | 1792 | |
| I-52 | 3195 | | | | 1779.887 | 1781.5 | | |
| I-53 | 5000 | | | | 1824.872 | 1826.5 | | |
| I-54 | 3187 | | | | 1824.872 | 1826.6 | | |
| I-55 | 5000 | | | | 1810.857 | 1812.5 | | |
| I-56 | | | | | 1866.898 | 1868.6 | | |
| I-57 | | | | | 1866.898 | 1868.6 | | |
| I-58 | | | | | 1833.873 | 1835.6 | | |
| I-59 | | | | | 1833.873 | 1835.7 | | |
| I-60 | | | | | 1826.888 | 1850.6 | 1826.3 | |
| I-61 | | | | | 1826.888 | 1850.6 | 1826.3 | |
| I-62 | | | | | 1836.836 | 1838.6 | 1936.2 | |
| I-63 | | | | | 1836.836 | 1838.6 | 1936.2 | |
| I-64 | 4246 | | | | 1826.863 | 1828.7 | | |
| I-65 | | | | | 1826.863 | 1828.7 | 1826.4 | |
| I-66 | 1090 | | | | 1840.878 | 1842.8 | 1840.5 | |
| I-67 | 1227 | | | | 1840.878 | 1842.7 | | |
| I-68 | | | | | 1824.92 | 1826.8 | | |
| I-69 | | | | | 1824.92 | 1826.7 | | |
| I-70 | | | | | 1838.936 | 1840.8 | | |
| I-71 | | | | | 1838.936 | 1840.9 | 1838.5 | |
| I-72 | | | | | 1864.951 | 1867 | 1864.6 | |
| I-73 | | | | | 1864.951 | 1866.8 | | |
| I-74 | | | | | 1826.888 | 1850.6 | 1826.3 | |
| I-75 | | | | | 1826.888 | 1850.6 | 1826.3 | |
| I-76 | | | | | 1786.857 | 1788.6 | 1786.2 | |
| I-77 | | | | | 1838.832 | 1840.7 | 1838.4 | |
| I-78 | 5000 | | | | 1838.832 | 1840.6 | | |
| I-79 | | | | | 1856.822 | 1858.6 | | |
| I-80 | | | | | 1821.836 | 1823.7 | 1821.4 | |
| I-81 | | | | | 1821.836 | 1823.7 | 1821.4 | |
| I-82 | | | | | 1821.836 | 1823.7 | 1821.4 | |
| I-83 | | | | | 1821.836 | 1823.7 | 1821.4 | |
| I-84 | | | | | 1821.836 | 1823.8 | 1821.4 | |
| I-85 | | | | | 1821.836 | 1823.7 | 1821.3 | |
| I-86 | | | | | 1821.836 | 1823.7 | 1821.3 | |
| I-87 | | | | | 1821.836 | 1823.7 | 1821.4 | |
| I-88 | | | | | 1821.836 | 1823.7 | 1821.4 | |
| I-89 | | | | | 1863.847 | 1187.8 | 1163.5 | |
| I-90 | | | | | 1863.847 | 1865.8 | | |
| I-91 | | | | | 1863.847 | 1865.9 | | |
| I-92 | | | | | 1863.847 | 1887.7 | 1863.3 | |
| I-93 | | | | | 1812.872 | 1814.7 | | |
| I-94 | | | | | 1812.872 | 1814.8 | | |
| I-95 | | | | | 1812.872 | 1814.9 | | |
| I-96 | | | | | 1812.872 | 1814.7 | | |
| I-97 | | | | | 1866.898 | 1868.7 | | |
| I-98 | | | | | 1866.898 | 1868.8 | | |
| I-99 | | | | | 1852.882 | 1854.8 | | |
| I-100 | | | | | 1852.882 | 1876.8 | 1852.4 | |
| I-101 | | | | | 1850.852 | 1852.6 | | |
| I-102 | | | | | 1850.852 | 1852.6 | | |
| I-103 | | | | | 1850.852 | 1852.9 | | |
| I-104 | | | | | 1850.852 | 1852.7 | | |
| I-105 | | | | | 1863.847 | 1887.5 | | |
| I-106 | | | | | 1863.847 | 1865.6 | | |
| I-107 | | | | | 1863.847 | | | |
| I-108 | | | | | 1863.847 | 1865.6 | | |
| I-109 | | | | | 1863.847 | 1887.6 | | |
| I-110 | | | | | 1864.831 | 1866.6 | | |
| I-111 | | | | | 1864.831 | 1866.7 | | |
| I-112 | | | | | 1870.857 | 1872.6 | | |
| I-113 | | | | | 1870.857 | 1872.6 | | |
| I-114 | | | | | 1902.898 | 1904.7 | | |
| I-115 | | | | | 1902.898 | 1904.8 | | |
| I-116 | | | | | 1902.898 | 1904.8 | | |
| I-117 | | | | | 1834.857 | 1836.6 | | |
| I-118 | | | | | 1834.857 | 1858.9 | 1834.2 | |
| I-119 | | | | | 1850.852 | 1852.7 | 1850.4 | |
| I-120 | | | | | 1850.852 | 1852.8 | 1850.4 | |
| I-121 | | | | | 1788.8 | 1790.4 | | |
| I-122 | | | | | 1788.8 | 1790.6 | | |
| I-123 | 2112 | | | | 1793.903 | 1795.8 | 1793.4 | |
| I-124 | | | | | 1778.903 | 1780.8 | 1778.4 | |
| I-125 | 3059 | | | | 1778.903 | 890.9. | 1778.4 | |
| I-126 | | | | | 1792.919 | 1794.8 | | |
| I-127 | 4841 | | | | 1792.919 | 1794.8 | | |
| I-128 | | | | | 1665.844 | 1667.7 | | |
| I-129 | 1981 | | | | 1807.919 | 905.6 | 1808.5 | |
| I-130 | | | | | 1838.888 | 1840.8 | | |
| I-131 | 2160 | | | | 1838.888 | 1840.8 | | |
| I-132 | 5000 | | | | 1779.887 | 1781.8 | | |
| I-133 | 5000 | | | | 1750.897 | | 1751.4 | |
| I-134 | 2696 | | | | 1750.897 | | 1751.2 | |
| I-135 | 1867 | | | | 1736.881 | 1760.7 | 1736.4 | |
| I-136 | | | | | 1807.919 | 1809.9 | | |
| I-137 | | | | | 1807.919 | 1810.1 | 1807.6 | |
| I-138 | | | | | 1777.944 | 1628.9 | | |
| I-139 | | | | | 1777.944 | 1779.9 | | |
| I-140 | 2269 | | | | 1804.908 | 1806.8 | 1804.5 | |
| I-141 | | | | | 1676.849 | 1700.8 | 1676.4 | |
| I-142 | | | | | 1822.898 | 1824.9 | 1822.6 | |
| I-143 | 2272 | | | | 1805.903 | 1807.8 | 1805.5 | |
| I-144 | 146.5 | | | | 1810.864 | 1812.8 | 1810.5 | |
| I-145 | | | | | 1830.923 | 1832.9 | 1830.5 | |
| I-146 | | | | | 1811.893 | 1813.8 | 1811.4 | |
| I-147 | 1637 | | | | 1717.835 | 1719.8 | 1717.4 | |
| I-148 | 2772 | | | | 1703.82 | 1705.7 | 1703.3 | |
| I-149 | | | | | 1755.826 | 1757.8 | | |
| I-150 | | | | | 1755.826 | 1757.7 | | |
| I-151 | | | | | 1618.767 | 1642.6 | | |
| I-152 | 5000 | | | | 1783.857 | 1785.8 | | |
| I-153 | 2135 | | | | 1774.857 | 1776.8 | | |
| I-154 | 5000 | | | | 1717.835 | 1719.7 | | |
| I-155 | 5000 | | | | 1717.835 | 1719.7 | | |
| I-156 | | | | | 1798.831 | 1729.7 | | |
| I-157 | | | | | 1772.841 | 1796.7 | 1772.4 | |
| I-158 | | | | | 1772.841 | 1774.8 | 1772.5 | |
| I-159 | | | | | 1729.835 | 1753.7 | 1729.4 | |
| I-160 | | | | | 1729.835 | | 1729.4 | |
| I-161 | | | | | 1802.815 | 1804.7 | 1802.4 | |
| I-162 | | | | | 1802.815 | 1804.8 | 1802.5 | |
| I-163 | | | | | 1808.805 | 1810.7 | | |
| I-164 | | | | | 1808.805 | 1832.7 | 1808.5 | |
| I-165 | | | | | 1823.913 | 1825.8 | 1823.6 | |
| I-166 | 2164 | | | | 1811.893 | 1813.8 | 1811.5 | |
| I-167 | | | | | 1795.919 | 1797.9 | | |
| I-168 | | | | | 1795.919 | 1797.9 | | |
| I-169 | | | | | 1861.89 | 1863.9 | | |
| I-170 | | | | | 1833.934 | 1836.1 | | |
| I-171 | | | | | 1833.934 | 1838 | | |
| I-172 | 5000 | | | | 1836.945 | 1838.9 | | |
| I-173 | 3116 | | | | 1836.945 | 1839 | | |
| I-174 | 1760 | | | | 1859.925 | 1862.3 | 1860.3 | |
| I-176 | 1992 | | | | 1844.95 | 1847.3 | 1845.4 | |
| I-178 | 1633 | | | | 1831.893 | 1834.2 | 1832.1 | |
| I-180 | 56 | | | | 1864.94 | 934.1 | 1865.4 | |
| I-181 | 310 | | | | 1864.94 | 1867.4 | 1865.6 | |
| I-182 | 2800 | | | | 1793.903 | 1796.2 | | |
| I-183 | | | | | 1883.856 | 1886.3 | 1884.2 | |
| I-184 | 3109 | | | | 1840.889 | 1843.2 | 1841.4 | |
| I-185 | | | | | 1755.836 | 879.5 | 1756.2 | |
| I-186 | 5000 | | | | 1708.85 | 856 | 1709.1 | |
| I-187 | 3318 | | | | 1708.85 | 856 | | |
| I-188 | 1597 | | | | 1904.91 | 1907.4 | 1905.4 | |
| I-190 | 696 | | | | 1904.91 | 1907.4 | | |
| I-191 | 1656 | | | | 1736.881 | 870 | | |
| I-193 | 533 | | | | 1736.881 | 870 | | |
| I-194 | 1008 | | | | 1807.919 | 905.6 | | |
| I-195 | | | | | 1825.944 | 1828.4 | 1826.3 | |
| I-196 | | | | | 1839.96 | 1842.6 | | |
| I-197 | | | | | 1839.96 | 1842.3 | 1840.6 | |
| I-198 | 5000 | | | | 1792.919 | 898.1 | 1793.4 | |
| I-199 | 5000 | | | | 1792.919 | 898.1 | 1793.4 | |
| I-200 | 5000 | | | | 1792.919 | 898.1 | 1793.3 | |
| I-201 | | | | | 1825.944 | 1828.4 | 1826.2 | |
| I-202 | | | | | 1841.939 | 1844.4 | 1842.5 | |
| I-203 | | | | | 1839.96 | 1842.4 | | |
| I-204 | | | | | 1843.935 | 1946.4 | | |
| I-205 | | | | | 1791.96 | 897.6 | 1792.4 | |
| I-206 | | | | | 1815.935 | 1818.3 | 1816.5 | |
| I-207 | 1745 | | | | 1807.919 | 1810.3 | | |
| I-209 | | | | | 1847.875 | 1850.3 | | |
| I-211 | 5000 | | | | 1847.875 | 1850.3 | 1848.3 | |
| I-213 | | | | | 1826.94 | 1829.4 | 1827.4 | |
| I-214 | | | | | 1826.94 | 1829.5 | 1827.5 | |
| I-215 | | | | | 1791.96 | 1794.3 | 1792.5 | |
| I-217 | 1957 | | | | 1823.913 | 1826.2 | 1824.4 | |
| I-219 | 2855 | | | | 1829.884 | 1832.5 | 1830.3 | |
| I-221 | | | | | 1822.82 | 913 | 1823.3 | |
| I-223 | | | | | 1822.82 | 913 | 1823.4 | |
| I-225 | | | | | 1910.794 | 957 | 1911.2 | |
| I-227 | | | | | 1910.794 | 1913 | 1911 | |
| I-229 | | | | | 1826.94 | 1929.3 | 1927.5 | |
| I-230 | | | | | 1826.94 | 1929.3 | 1927.2 | |
| I-231 | | | | | 1867.901 | 1870.7 | 1868.4 | |
| I-232 | | | | | 1861.944 | 1964.4 | 1862.3 | |
| I-233 | | | | | 1850.94 | 1853.4 | 1851.4 | |
| I-234 | | | | | 1861.944 | 1864.4 | 1862.6 | |
| I-235 | | | | | 1887.96 | 945.7 | 1888.4 | |
| I-236 | 5000 | | | | 1847.875 | 1850.2 | 1848.4 | |
| I-238 | 1592 | | | | 1847.875 | 1850.2 | 1848.4 | |
| I-240 | | | | | 1847.875 | 1850.2 | 1848.3 | |
| I-242 | | | | | 1847.875 | 925.6 | | |
| I-244 | | | | | 1879.916 | 1882 | 1880 | |
| I-246 | | | | | 1879.916 | 1882.3 | | |
| I-248 | | | | | 1847.875 | 1850.3 | | |
| I-250 | 5000 | | | | 1847.875 | 1850.2 | | |
| I-252 | | | | | 1847.875 | 1850.3 | | |
| I-254 | 5000 | | | | 1847.875 | 1850.3 | 1848.3 | |
| I-256 | | | | | 1879.935 | 1882 | 1880 | |
| I-257 | | | | | 1829.919 | 1832 | 1830 | |
| I-258 | | | | | 1829.919 | 1832 | 1830 | |
| I-259 | | | | | 1847.91 | 1850 | 1848 | |
| I-260 | 5000 | | | | 1797.878 | 1800 | 1798 | |
| I-261 | 5000 | | | | 1797.878 | 1800 | 1798 | |
| I-262 | 5000 | | | | 1815.868 | 1818 | 1816 | |
| I-263 | 5000 | | | | 1815.868 | 1818 | 1816 | |
| I-264 | 5000 | | | | 1797.878 | 1800 | 1798 | |
| I-265 | 3762 | | | | 1797.878 | 1800 | 1798 | |
| I-266 | 5000 | | | | 1797.878 | 1800 | 1798 | |
| I-267 | 5000 | | | | 1815.868 | 1818 | 1816 | |
| I-268 | | | | | 1793.903 | 1796 | 1794 | |
| I-269 | | | | | 1809.898 | 1812 | 1810 | |
| I-270 | 5000 | | | | 1812.924 | 1815 | 1813 | |
| I-271 | 5000 | | | | 1812.924 | 1815 | 1813 | |
| I-272 | | | | | 1812.924 | 1815 | 1813 | |
| I-273 | | | | | 1841.939 | 1844 | 1842 | |
| I-274 | | | | | 1827.924 | 1830 | 1828 | |
| I-275 | 5000 | | | | 1829.903 | 1832 | 1830 | |
| I-276 | 3428 | | | | 1829.903 | 1832 | 1830 | |
| I-277 | | | | | 1829.903 | 1832 | 1830 | |
| I-278 | | | | | 1829.903 | 1832 | 1830 | |
| I-279 | | | | | 1793.903 | 1796 | 1794 | |
| I-280 | | | | | 1793.903 | 1796 | 1794 | |
| I-281 | | | | | 1793.903 | 1796 | 1794 | |
| I-282 | | | | | 1793.903 | 1796 | 1794 | |
| I-283 | | | | | 1747.846 | 1750 | 1748 | |
| I-284 | | | | | 1746.862 | 1749 | 1747 | |
| I-285 | 5000 | | | | 1769.878 | 1772 | 1770 | |
| I-286 | 4482 | | | | 1694.834 | 849 | 1694.9 | |
| I-287 | 4954 | | | | 1751.856 | 1754 | 1752 | |
| I-288 | 1313 | | | | 1751.856 | 1754 | 1752 | |
| I-289 | 5000 | | | | 1651.829 | 827.5 | | |
| I-290 | 3286.5 | | | | 1651.829 | 827.5 | | |
| I-291 | 3129 | | | | 1722.866 | 863 | | |
| I-292 | 1871 | | | | 1722.866 | 863 | | |
| I-293 | 139.5 | | | | 1907.878 | 955.6 | 1908.1 | |
| I-294 | 130 | | | | 1825.839 | 914.6 | 1826.3 | |
| I-295 | 5000 | | | | 1907.896 | 955.7 | 1908 | |
| I-296 | | | | | 1850.874 | 827.1 | 1851.2 | |
| I-297 | | | | | 1878.906 | 941.2 | 1879.2 | |
| I-298 | | | | | 1866.869 | 935.1 | 1867.5 | |
| I-299 | 1303 | | | | 1798.828 | 901.1 | 1799.3 | |
| I-300 | | | | | 1879.901 | 941.7 | 1880.5 | |
| I-301 | | | | | 1842.906 | 923.1 | 1843.4 | |
| I-302 | | | | | 1886.801 | 1889.1 | 1887.2 | |
| I-303 | | | | | 1887.96 | 1890.3 | 1888.3 | |
| I-304 | 5000 | | | | 1801.919 | 1804.1 | 1802.2 | |
| I-305 | 3982.5 | | | | 1801.919 | 1804.1 | 1802.2 | |
| I-306 | 5000 | | | | 1813.848 | 908.8 | 1814 | |
| I-307 | 4196 | | | | 1813.848 | 908.8 | 1814 | |
| I-308 | 5000 | | | | 1813.848 | 908.8 | | |
| I-309 | 3118 | | | | 1813.848 | 908.8 | | |
| I-310 | | | | | 1813.848 | 908.8 | | |
| I-311 | | | | | 1813.848 | 908.8 | | |
| I-312 | | | | | 1813.848 | 908.8 | | |
| I-313 | | | | | 1813.848 | 908.8 | | |
| I-314 | | | | | 1815.935 | 909.7 | | |
| I-315 | | | | | 1815.935 | 909.6 | | |
| I-316 | 3982 | | | | 1751.856 | 877.5 | | |
| I-317 | 5000 | | | | 1797.878 | 900.6 | | |
| I-318 | 4633 | | | | 1797.878 | 900.6 | | |
| I-319 | 1419 | | | | 1797.878 | 900.6 | | |
| I-320 | | | | | 1769.878 | 886.6 | | |
| I-321 | | | | | 1769.878 | 886.6 | | |
| I-322 | 5000 | | | | 1794.898 | 899.1 | | |
| I-323 | 3471 | | | | 1794.898 | 899.1 | | |
| I-324 | | | | | 1826.94 | 915.2 | | |
| I-325 | 1310 | | | | 1785.844 | 894.6 | | |
| I-326 | 1752 | | | | 1785.844 | 894.6 | 1786.4 | |
| I-327 | 4724 | | | | 1769.866 | 886.5 | 1770.3 | |
| I-328 | 1914 | | | | 1769.866 | 886.5 | 1770.3 | |
| I-329 | 5000 | | | | 1783.893 | 1786.3 | | |
| I-330 | 5000 | | | | 1783.893 | 1786.1 | | |
| I-331 | 5000 | | | | 1783.893 | 1786 | | |
| I-332 | 5000 | | | | 1783.893 | 1786.1 | | |
| I-333 | 2756 | | | | 1726.824 | 871 | 1739.1 | |
| I-334 | 5000 | | | | 1738.861 | 865 | 1727.2 | |
| I-335 | 1544 | | | | 1738.861 | 865 | 1727 | |
| I-336 | 153 | | | | 1839.854 | 1842.1 | | |
| I-337 | 5000 | | | | 1839.854 | 921.6 | 1840.2 | |
| I-338 | 5000 | | | | 1839.854 | 921.6 | 1840.2 | |
| I-339 | 5000 | | | | 1840.838 | 922.1 | 1841.2 | |
| I-340 | 5000 | | | | 1840.838 | 1843.2 | 1841.3 | |
| I-341 | 2000 | | | | 1812.843 | 1815 | 1813.3 | |
| I-342 | 58.5 | | | | 1798.828 | 1801.1 | 1799.3 | |
| I-343 | 172 | | | | 1811.823 | 1814.1 | 1812.3 | |
| I-344 | 42 | | | | 1811.823 | 1814.1 | 1812 | |
| I-345 | 134 | | | | 1826.859 | 1829.2 | 1827.2 | |
| I-346 | 180 | | | | 1853.87 | 1856.2 | 1854.3 | |
| I-347 | 121.5 | | | | 1853.87 | 1856.2 | 1854.3 | |
| I-348 | 5000 | | | | 1735.897 | 869.5 | | |
| I-349 | 5000 | | | | 1735.897 | 869.5 | 1736 | |
| I-350 | 5000 | | | | 1735.897 | 869.6 | 1736.3 | |
| I-351 | 5000 | | | | 1735.897 | 869.5 | | |
| I-352 | 5000 | | | | 1735.897 | 869.5 | | |
| I-353 | 5000 | | | | 1703.856 | 853.5 | 1704.1 | |
| I-354 | 5000 | | | | 1703.856 | 853.5 | 1704.3 | |
| I-355 | 5000 | | | | 1703.856 | 1706 | 1704.2 | |
| I-356 | 5000 | | | | 1703.856 | 853.5 | 1704.1 | |
| I-357 | 5000 | | | | 1664.845 | 834 | 1665.2 | |
| I-358 | 5000 | | | | 1664.845 | 834 | | |
| I-359 | 5000 | | | | 1821.844 | 1824.2 | 1822.3 | |
| I-360 | 145.5 | | | | 1834.839 | 1837.1 | | |
| I-361 | 42 | | | | 1834.839 | 1837.1 | | |
| I-362 | 3656 | | | | 1758.808 | 1761.1 | | |
| I-363 | 5000 | | | | 1758.808 | 1761 | | |
| I-364 | 5000 | | | | 1758.808 | 1761.1 | | |
| I-365 | 2715 | | | | 1782.833 | 893.1 | 1783.4 | |
| I-366 | 1445 | | | | 1782.833 | 1785 | 1783.1 | |
| I-367 | 177 | | | | 1782.833 | 1785.1 | 1783.3 | |
| I-368 | 5000 | | | | 1808.883 | 906.1 | 1809.3 | |
| I-369 | 2311 | | | | 1782.833 | 893.6 | 1784.2 | |
| I-370 | 1563 | | | | 1818.833 | 1821.2 | 1819.2 | |
| I-371 | 1389 | | | | 1786.808 | 895.1 | | |
| I-372 | 2093 | | | | 1800.823 | 1803.4 | | |
| I-373 | 945 | | | | 1864.836 | 941.1 | 1879.2 | |
| I-374 | 3011 | | | | 1836.804 | 1853.4 | 18951 | |
| I-376 | 1321 | | | | 1836.804 | 927.1 | 1851.4 | |
| I-378 | 1336 | | | | 1893.826 | 955.6 | 1908.3 | |
| I-380 | 552 | | | | 1893.826 | 955.6 | 1908.2 | |
| I-381 | 3653 | | | | 1813.855 | 1816.3 | 1814.3 | |
| I-382 | 2064 | | | | 1813.855 | 908.6 | 1814.3 | |
| I-383 | 5000 | | | | 1811.859 | 1814.3 | 1812.2 | |
| I-384 | 177 | | | | 1811.859 | 1814.2 | 1812 | |
| I-385 | 3150 | | | | 1811.859 | 907.6 | | |
| I-386 | 5000 | | | | 1811.859 | 1814.3 | | |
| I-387 | 2621 | | | | 1811.859 | 1814.3 | | |
| I-388 | 5000 | | | | 1846.845 | 1877 | 1875.1 | |
| I-389 | 5000 | | | | 1846.845 | 939 | 1875.1 | |
| I-390 | 3422 | | | | 1846.845 | 1877 | 1875 | |
| I-391 | 1913 | | | | 1846.845 | 1876.8 | 1875 | |
| I-392 | 5000 | | | | 1802.895 | 895.5 | | |
| I-393 | 1953 | | | | 1802.895 | 895.5 | | |
| I-394 | 5000 | | | | 1846.845 | 1214.5 | 1212.4 | |
| I-395 | 5000 | | | | 1824.88 | 1192.5 | 1190.4 | |
| I-396 | 3427 | | | | 1836.871 | | 1937.3 | |
| I-397 | 2229 | | | | 1836.871 | 1839.1 | 1837.2 | |
| I-398 | 2155 | | | | 1881.856 | 1884.3 | | |
| I-399 | 2499 | | | | 1865.861 | 1868.2 | 1866 | |
| I-400 | 3587 | | | | 1910.846 | 1913.1 | 1911.2 | |
| I-401 | 134 | | | | 1863.801 | | 1863.8 | |
| I-402 | 5000 | | | | 1852.837 | 1855.1 | 1853.2 | |
| I-403 | 2128 | | | | 1850.887 | 1853 | 1851.2 | |
| I-404 | 1851 | | | | 1968.874 | | 1969.3 | |
| I-405 | 3821 | | | | 2013.859 | | 2014.4 | |
| I-406 | 94 | | | | 1839.854 | 1841.9 | | |
| I-407 | 30 | | | | 1881.901 | 1884 | | |
| I-408 | 120 | | | | 1753.843 | 878.5 | 1754.2 | |
| I-409 | 70 | | | | 1753.843 | 878.5 | 1754 | |
| I-410 | 50 | | | | 1867.885 | 1869.9 | | |
| I-411 | 189 | | | | 1824.88 | 1826.9 | | |
| I-412 | 92 | | | | 1905.848 | | 1906.1 | |
| I-413 | 90 | | | | 1849.861 | 926.5 | | |
| I-414 | 3417 | | | | 1863.877 | 1866 | | |
| I-415 | 2201 | | | | 1863.877 | 1866 | | |
| I-416 | 5000 | | | | 1863.877 | 1866 | | |
| I-417 | 5000 | | | | 1863.877 | 1866 | | |
| I-418 | 149 | | | | 1848.855 | 1851 | | |
| I-419 | 23 | | | | 1848.855 | 1850.9 | | |
| I-420 | 127.5 | | | | 1821.844 | 1824.1 | 1822.1 | |
| I-421 | 99 | | | | 1834.839 | 1836.9 | | |
| I-422 | 27 | | | | 1834.839 | 1836.9 | | |
| I-423 | 105 | | | | 1812.843 | | 1813.2 | |
| I-424 | 170 | | | | 1825.839 | 1828.4 | | |
| I-425 | 50 | | | | 1825.839 | | 1826.3 | |
| I-426 | 109 | | | | 1845.811 | 1848.4 | 1846.6 | |
| I-427 | 38.5 | | | | 1845.811 | 1848.2 | 1848.4 | |
| I-428 | 60 | | | | 1845.811 | 1848.2 | 1846.2 | |
| I-429 | 146 | | | | 1863.801 | 1866.2 | 1864.3 | |
| I-430 | 154 | | | | 1872.802 | 1875.1 | 1873 | |
| I-431 | 1320 | | | | 1735.743 | | 1736.1 | |
| I-432 | 145 | | | | 1697.78 | | 1697.8 | |
| I-433 | 136 | | | | 1812.843 | | 1813.1 | |
| I-434 | 67.5 | | | | 1843.829 | 1845.9 | 1844 | |
| I-435 | 70 | | | | 1859.8 | 1862.4 | | |
| I-436 | 56 | | | | 1903.749 | 1906.9 | 1905.1 | |
| I-437 | 26 | 17.5 | | | 1855.849 | 1857.9 | 1856.1 | |
| I-438 | 5000 | | | | 1829.845 | 1831.9 | 1830.3 | |
| I-439 | 5000 | | | | 1829.845 | 1831.9 | 1830 | |
| I-440 | 5000 | | | | 1829.845 | 1831.9 | 1830.1 | |
| I-441 | 133 | | | | 1870.824 | 1872.8 | 1870.8 | |
| I-442 | 4484 | | | | 1839.854 | 1841.9 | 1840.1 | |
| I-443 | 2126 | | | | 1839.854 | 1841.9 | 1840 | |
| I-444 | 80 | | | | 1835.845 | | 1836 | |
| I-445 | 4962 | | | | 1835.845 | | 1835.9 | |
| I-446 | 130 | | | | 1831.795 | 1833.9 | 1832 | |
| I-447 | 74 | | | | 1831.795 | | 1832 | |
| I-448 | 92 | | | | 1831.795 | 1833.9 | 1831.9 | |
| I-449 | 53 | | | | 1831.795 | | 1831.8 | |
| I-450 | 3717 | | | | 1846.84 | 1848.9 | 1846.9 | |
| I-451 | 5000 | | | | 1846.84 | | 1847 | |
| I-452 | 1656 | | | | 1846.84 | | 1846.8 | |
| I-453 | 1554 | | | | 1843.829 | 1845.8 | 1844 | |
| I-454 | 125 | | | | 1843.829 | 923.5. | 1844.2 | |
| I-455 | 83.5 | | | | 1843.829 | 923.5. | 1844.2 | |
| I-456 | 2168 | | | | 1839.854 | 921.5. | 1840.1 | |
| I-457 | 1435 | | | | 1839.854 | 921.5. | 1839.9 | |
| I-458 | 101.5 | | | | 1839.854 | 921.5. | 1840.1 | |
| I-459 | 183 | | | | 1839.854 | 921.5. | 1840.1 | |
| I-460 | 195.5 | | | | 1815.818 | 909.5. | 1815.9 | |
| I-461 | 125 | | | | 1840.849 | 1842.9 | 1841.2 | |
| I-462 | 28 | >>20 | | | 1868.808 | 1870.4 | | |
| I-463 | 92 | | | | 1882.824 | 1884.4 | | |
| I-464 | 57 | | | | 1882.824 | 1884.4 | | |
| I-465 | 81 | | | | 1820.823 | 1822.8 | 1820.8 | |
| I-466 | 19 | | | | 1820.823 | 1822.8 | 1820.9 | |
| I-467 | 44 | | | | 1853.87 | 1855.8 | | |
| I-468 | 27 | | | | 1853.87 | 1855.8 | | |
| I-469 | 27 | | | | 1862.87 | 1864.8 | | |
| I-470 | 11 | | | | 1862.87 | 1864.8 | | |
| I-471 | 52 | | | | 1890.901 | 1892.8 | | |
| I-472 | 62 | | | | 1876.886 | 1878.8 | | |
| I-473 | 121 | | | | 1839.854 | 1841.7 | | |
| I-474 | 43 | | | | 1839.854 | 1841.7 | | |
| I-475 | 102 | | | | 1867.885 | 1869.8 | | |
| I-476 | 48 | | | | 1867.885 | 1869.8 | | |
| I-477 | 119 | | | | 1869.865 | 1871.7 | | |
| I-478 | 71 | | | | 1848.855 | 1850.9 | | |
| I-479 | 27 | | | | 1848.855 | 1850.8 | | |
| I-480 | 176 | | | | 1848.855 | 1850.9 | | |
| I-481 | 42 | | | | 1848.855 | 1850.9 | | |
| I-482 | 118 | | | | 1839.891 | 1841.8 | | |
| I-483 | 5000 | | | | 1860.876 | 932 | | |
| I-484 | 5000 | | | | 1860.876 | 932 | | |
| I-485 | 34 | 11.3 | | | 1887.858 | 1889.8 | | |
| I-486 | 147 | | | | 1845.811 | 1847.8 | | |
| I-487 | 45 | | | | 1845.811 | 1847.7 | | |
| I-488 | 43 | | | | 1896.858 | 1898.8 | | |
| I-489 | 57 | | | | 1882.842 | 1884.8 | | |
| I-490 | 88 | | | | 1848.843 | | 1848.7 | |
| I-491 | 153 | | | | 1812.843 | | 1812.7 | |
| I-492 | 53 | | | | 1812.843 | | 1812.8 | |
| I-493 | 88 | | | | 1798.828 | | 1798.8 | |
| I-494 | 82 | | | | 1839.854 | 1841.8 | | |
| I-495 | 181 | | | | 1867.885 | 1869.8 | 1867.9 | |
| I-496 | 5000 | | | | 1825.875 | 1827.8 | | |
| I-497 | 5000 | | | | 1825.875 | | 1825.8 | |
| I-498 | 5000 | | | | 1825.875 | 1827.8 | 1825.8 | |
| I-499 | 123 | | | | 1945.868 | 1947.8 | | |
| I-500 | 176 | | | | 1987.915 | 1989.9 | | |
| I-501 | 94 | | | | 1907.842 | 1909.8 | | |
| I-502 | 55 | | | | 1907.842 | 1909.7 | | |
| I-503 | 84 | | | | 1889.851 | 1891.8 | | |
| I-504 | 65 | | | | 1916.842 | 1918.8 | | |
| I-505 | 23 | 4.9 | 9.4 | | 1881.901 | 1883.9 | | |
| I-506 | 25 | 8.9 | | | 1890.901 | 1892.9 | | |
| I-507 | 192 | | | | 1812.843 | 907.9 | | |
| I-508 | 73 | | | | 1812.843 | 907.9 | | |
| I-509 | 99 | | | | 1796.848 | 899.9 | | |
| I-510 | 128 | | | | 1864.849 | 1866.9 | | |
| I-511 | 40 | | | | 1864.849 | 1866.8 | | |
| I-512 | 20 | 12.3 | | | 1906.896 | 1908.9 | | |
| I-513 | 143 | | | | 1877.845 | 1879.7 | | |
| I-514 | 30 | >>20 | | | 1919.892 | 1921.8 | | |
| I-515 | 54 | | | | 1840.795 | 1842.9 | | |
| I-516 | 23 | 30.5 | | | 1840.795 | 1842.8 | | |
| I-517 | 15 | 9.7 | | | 1882.842 | 1884.9 | | |
| I-518 | 143 | | | | 1831.795 | 917.4 | | |
| I-519 | 33 | 28.8 | | | 1831.795 | 917.4 | | |
| I-520 | 45 | | | | 1873.842 | 938.4 | | |
| I-521 | 23 | 15.4 | | | 1873.842 | 938.4 | | |
| I-522 | 75 | | | | 1867.885 | 935.4 | | |
| I-523 | 44 | | | | 1867.885 | 935.4 | | |
| I-524 | 2550 | | | | 1832.79 | 1834.6 | | |
| I-525 | 196 | | | | 1869.865 | 1871.6 | 1869.6 | |
| I-526 | 56 | | | | 1869.865 | 1871.6 | | |
| I-527 | 98 | | | | 1911.912 | 1913.7 | | |
| I-528 | 63 | | | | 1911.912 | 1913.7 | 1911.7 | |
| I-529 | 5000 | | | | 1874.837 | 939 | | |
| I-530 | 5000 | | | | 1874.837 | 939 | | |
| I-531 | 5000 | | | | 1888.853 | 946 | | |
| I-532 | 5000 | | | | 1888.853 | 946 | | |
| I-533 | 155 | | | | 1860.822 | 931.9 | | |
| I-534 | 5000 | | | | 1874.837 | 938.9 | | |
| I-535 | 5000 | | | | 1837.911 | 1839.8 | | |
| I-536 | 4469 | | | | 1823.896 | 1825.7 | | |
| I-537 | 5000 | | | | 1837.911 | 1839.8 | | |
| I-538 | 5000 | | | | 1835.896 | 1837.7 | | |
| I-539 | 5000 | | | | 1849.911 | 1851.8 | | |
| I-540 | 5000 | | | | 1809.88 | 906.4 | | |
| I-541 | 180 | | | | 1883.88 | 943.4 | | |
| I-542 | 109 | | | | 1883.88 | 943.4 | | |
| I-543 | 32 | 17.0 | | | 1876.886 | 1878.8 | 1876.6 | |
| I-544 | 24 | 4.6 | | | 1895.917 | 1897.6 | 1895.5 | |
| I-545 | 21 | 3.5 | | | 1895.917 | 1897.6 | 1895.5 | |
| I-546 | 16 | 12.1 | | | 1867.885 | 1869.5 | | |
| I-547 | 43 | | | | 1867.885 | 1869.4 | | |
| I-548 | 17 | 15.6 | | | 1867.885 | 1869.4 | | |
| I-549 | 71 | | | | 1883.88 | 1885.4 | | |
| I-550 | 30 | 21.4 | | | 1883.88 | 1885.4 | | |
| I-551 | 45 | | | | 1859.826 | 1861.4 | | |
| I-552 | 15.5 | | | | 1859.826 | 1861.4 | | |
| I-553 | 61 | | | | 1892.881 | 1894.7 | | |
| I-554 | 27.5 | | | | 1892.881 | 1894.6 | | |
| I-555 | 41 | | | | 1868.827 | 1870.7 | | |
| I-556 | 20 | | | | 1868.827 | 1870.6 | | |
| I-557 | 35 | 16.9 | | | 1867.885 | 1869.5 | | |
| I-558 | 56 | | | | 1867.885 | 1869.5 | | |
| I-559 | 43 | | | | 1867.885 | 1869.5 | | |
| I-560 | 81 | | | | 1876.886 | 1878.7 | | |
| I-561 | 34 | | | | 1876.886 | 1878.7 | | |
| I-562 | 51 | | | | 1853.87 | 1855.5 | | |
| I-563 | 19 | 15.7 | | | 1853.87 | 1855.5 | | |
| I-564 | 36 | >>20 | | | 1862.87 | 1864.7 | | |
| I-565 | 13 | 26.0 | | | 1862.87 | 1864.7 | | |
| I-566 | 76 | | | | 1839.854 | 1841.5 | | |
| I-567 | 37 | | | | 1839.854 | 1841.5 | | |
| I-568 | 73 | | | | 1853.87 | 1855.5 | | |
| I-569 | 42 | | | | 1853.87 | 1855.5 | | |
| I-570 | 56 | | | | 1862.87 | 1864.7 | | |
| I-571 | 32 | 15.6 | | | 1862.87 | 1864.7 | | |
| I-572 | 73 | | | | 1825.839 | 1827.4 | | |
| I-573 | 36 | 33.3 | | | 1825.839 | 1827.4 | | |
| I-574 | 36 | >>20 | | | 1834.839 | 1836.7 | | |
| I-575 | 21 | | | | 1834.839 | 1836.7 | | |
| I-576 | 23 | 11.1 | | | 1867.885 | 1869.5 | | |
| I-577 | 13 | 10.4 | | | 1867.885 | 1869.5 | | |
| I-578 | 5000 | | | | 1881.901 | 1883.7 | 1881.7 | |
| I-579 | 5000 | | | | 1877.862 | 1879.6 | 1877.6 | |
| I-580 | 114 | | | | 1876.886 | 1878.8 | 1876.7 | |
| I-581 | 112 | | | | 1876.886 | 1878.8 | 1876.7 | |
| I-582 | 17.5 | 15.8 | | | 1876.886 | 1878.8 | 1876.7 | |
| I-583 | 69 | | | | 1876.886 | 1878.8 | 1876.7 | |
| I-584 | 33 | | | | 1876.886 | 1878.8 | 1876.8 | |
| I-585 | 5000 | | | | 1881.901 | 1883.7 | 1881.6 | |
| I-586 | 5000 | | | | 1881.901 | 1883.7 | 1881.6 | |
| I-598 | 845 | | | | 1944.912 | 973.9. | 1944.6 | |
| I-599 | 138 | | | | 1944.912 | 973.9. | 1944.7 | |
| I-600 | 796 | | | | 1957.932 | 1959.7 | 1957.7 | |
| I-601 | 419 | | | | 1957.932 | 1959.7 | 1957.7 | |
| I-602 | 3150 | | | | 1972.943 | 988.98 | 1972.6 | |
| I-603 | 392 | | | | 1880.917 | 941.9. | 1880.7 | |
| I-604 | 692 | | | | 1909.944 | 1911.7 | 1909.6 | |
| I-605 | 632 | | | | 1909.944 | 1911.7 | 1909.7 | |
| I-606 | 289 | | | | 1943.917 | 1945.7 | 1943.7 | |
| I-607 | 253 | | | | 1943.917 | 1945.7 | 1943.7 | |
| I-608 | 211 | | | | 1924.943 | 1926.7 | 1924.7 | |
| I-609 | 80 | | | | 1924.943 | 1926.7 | 1924.7 | |
| I-610 | 54 | | | | 1978.915 | 1980.7 | 1978.6 | |
| I-611 | 55 | | | | 1978.915 | 1980.7 | 1978.6 | |
| I-612 | 64 | | | | 1895.917 | 1897.7 | 1895.7 | |
| I-613 | 1627 | | | | 1908.96 | 1910.8 | 1908.6 | |
| I-614 | 1143 | | | | 1908.96 | 1910.8 | 1908.8 | |
| I-615 | 50 | | | | 1916.917 | 1918.8 | 1916.7 | |
| I-616 | 108 | | | | 1919.928 | 1921.8 | 1919.6 | |
| I-617 | 253 | | | | 1863.891 | 1865.9 | 1863.7 | |
| I-618 | 135 | | | | 1863.891 | 1865.7 | 1863.7 | |
| I-619 | 44 | | | | 1907.917 | 1909.6 | 1907.6 | |
| I-620 | 35 | 12.0 | | | 1907.917 | 1909.5 | 1907.5 | |
| I-621 | 58 | | | | 1910.928 | 1912.5 | 1910.5 | |
| I-622 | 230 | | | | 1854.89 | 1856.5 | 1854.5 | |
| I-623 | 103 | | | | 1854.89 | 1856.4 | 1854.5 | |
| I-624 | 273 | | | | 1739.827 | 871.3 | 1739.4 | |
| I-625 | 119 | | | | 1739.827 | 871.3 | 1739.4 | |
| I-626 | 5000 | | | | 1779.858 | 891.3 | 1779.4 | |
| I-627 | 338 | | | | 1779.858 | 891.3 | 1779.4 | |
| I-628 | 60 | | | | 1782.869 | 892.8 | 1782.6 | |
| I-629 | 36 | 30.0 | | | 1782.869 | 892.8 | 1782.3 | |
| I-630 | 5000 | | | | 1984.871 | | | |
| I-631 | 5000 | | | | 1984.871 | | | |
| I-632 | 5000 | | | | 1984.871 | | | |
| I-633 | 88 | | | | 1909.944 | 1911.7 | 1909.5 | |
| I-634 | 425 | | | | 1866.927 | 934.9 | 1866.5 | |
| I-635 | 171 | | | | 1900.911 | 951.9 | 1900.5 | |
| I-636 | 198 | | | | 1916.906 | 959.9 | 1916.5 | |
| I-637 | 5000 | | | | 1850.895 | 926.9 | 1850.4 | |
| I-638 | 3876 | | | | 1850.895 | 926.8 | 1850.5 | |
| I-639 | 109 | | | | 1840.875 | 921.8 | 1840.4 | |
| I-640 | 87 | | | | 1840.875 | 921.8 | 1840.4 | |
| I-641 | 122 | | | | 1854.89 | 928.8 | 1854.4 | |
| I-642 | 118 | | | | 1854.89 | 928.8 | 1854.4 | |
| I-643 | 958 | | | | 1939.922 | 971.4 | 1939.5 | |
| I-644 | 808 | | | | 1939.922 | 971.4 | 1939.5 | |
| I-645 | 395 | | | | 1852.911 | 927.9 | 1852.4 | |
| I-646 | 461 | | | | 1852.911 | 927.8 | 1852.4 | |
| I-647 | 445 | | | | 1923.948 | 1925.5 | 1923.5 | |
| I-648 | 233 | | | | 1923.948 | 1925.5 | 1923.4 | |
| I-649 | 209 | | | | 1957.932 | 1959.5 | 1957.5 | |
| I-650 | 137 | | | | 1957.932 | 1959.4 | 1957.4 | |
| I-651 | 186 | | | | 1897.896 | 1899.4 | 1897.3 | |
| I-652 | 72 | | | | 1897.896 | 1899.4 | 1897.3 | |
| I-653 | 108 | | | | 1938.923 | 1940.4 | 1938.4 | |
| I-654 | 20 | 15.0 | | | 1938.923 | 1940.4 | 1938.4 | |
| I-655 | 183 | | | | 1996.943 | 1998.5 | 1996.5 | |
| I-656 | 73 | | | | 1923.948 | 1925.5 | 1923.4 | |
| I-657 | 46 | | | | 1923.948 | 1925.5 | 1923.4 | |
| I-658 | 546 | | | | 1923.948 | 963.3 | 1923.4 | |
| I-659 | 430 | | | | 1923.948 | 963.4 | 1923.4 | |
| I-660 | 544 | | | | 1957.932 | 980.4 | | |
| I-661 | 45 | | | | 1897.896 | 950.5 | | |
| I-662 | 26 | 16.1 | | | 1897.896 | 950.5 | | |
| I-663 | 43 | | | | 1938.923 | 971 | | |
| I-664 | 996 | | | | 1996.943 | 999.8 | | |
| I-665 | 923 | | | | 1996.943 | 999.7 | | |
| I-666 | 626 | | | | 1923.948 | | | |
| I-667 | 585 | | | | 1923.948 | | | |
| I-668 | 675 | | | | 1881.901 | | | |
| I-669 | 451 | | | | 1881.901 | | | |
| I-670 | 5000 | | | | 1895.917 | | | |
| I-671 | 3138 | | | | 1895.917 | | | |
| I-672 | 5000 | | | | 1895.917 | | | |
| I-673 | 5000 | | | | 1881.901 | | | |
| I-674 | 5000 | | | | 1881.901 | | | |
| I-675 | 4525 | | | | 1895.917 | | | |
| I-676 | 5000 | | | | 1895.917 | | | |
| I-677 | 22 | 6.7 | | | 1881.901 | 1883.3 | 1881.3 | |
| I-678 | 26 | 16.8 | | | 1873.842 | 1875.3 | 1873.3 | |
| I-679 | 7 | 17.1 | | | 1873.842 | 1875.3 | 1873.3 | |
| I-680 | 32 | 34.4 | | | 1859.826 | 1861.3 | 1859.3 | |
| I-681 | 12 | 25.1 | | | 1859.826 | 1861.3 | 1859.3 | |
| I-682 | 41 | | | | 1887.858 | 1889.3 | 1887.3 | |
| I-683 | 19 | 6.7 | | | 1887.858 | 1889.3 | 1887.3 | |
| I-684 | 15 | 14.3 | | | 1924.871 | 1926.3 | 1924.3 | |
| I-685 | 25 | 19.4 | | | 1924.871 | 1926.3 | 1924.3 | |
| I-686 | 5 | 12. | | | 1916.811 | 1918.3 | 1916.3 | |
| I-687 | 12 | 29.3 | | | 1916.811 | 1918.3 | 1916.3 | |
| I-688 | 6 | 30.1 | | | 1902.796 | 1904.3 | 1902.3 | |
| I-689 | 11 | 33.9 | | | 1902.796 | 1904.3 | 1902.3 | |
| I-690 | 7 | 17.8 | | | 1930.827 | 1932.3 | 1930.3 | |
| I-691 | 9 | 17.0 | | | 1930.827 | 1932.4 | 1930.4 | |
| I-692 | 9 | 25.6 | | | 1933.871 | 1935.7 | 1933.3 | |
| I-693 | 12 | 28.5 | | | 1933.871 | 1935.7 | 1933.4 | |
| I-694 | 5 | | | | 1925.812 | 1927.7 | 1925.4 | |
| I-695 | 5 | | | | 1925.812 | 1927.7 | 1925.4 | |
| I-696 | 5 | | | | 1911.796 | 1913.6 | 1911.3 | |
| I-697 | 5 | 14.7 | | | 1939.827 | 1941.7 | 1939.4 | |
| I-698 | 5 | | | | 1939.827 | 1941.7 | 1939.5 | |
| I-699 | 43 | | | | 1964.899 | 1966.4 | 1964.4 | |
| I-700 | 49 | | | | 1970.856 | 1972.4 | 1970.4 | |
| I-701 | 34 | 18.1 | | | 1970.856 | 1972.4 | 1970.4 | |
| I-702 | 76 | | | | 1979.856 | 1981.6 | 1979.5 | |
| I-703 | 57 | 11.9 | | | 1978.915 | 1980.5 | 1978.5 | |
| I-704 | 49 | | | | 1984.871 | 1986.5 | 1984.5 | |
| I-705 | 58 | | | | 1993.872 | 1995.8 | 1993.5 | |
| I-706 | 57 | | | | 2004.931 | 2006.5 | 2004.5 | |
| I-707 | 46 | | | | 2010.887 | 2012.5 | 2010.5 | |
| I-708 | 52 | | | | 2010.887 | 2012.5 | 2010.5 | |
| I-709 | 54 | | | | 2019.887 | 2021.8 | 2019.5 | |
| I-710 | 73 | | | | 1917.868 | 1919.2 | 1917.2 | |
| I-711 | 88 | | | | 1917.868 | 1919.3 | 1917.2 | |
| I-712 | 92 | | | | 1753.843 | 878.1 | 1753.1 | |
| I-713 | 70 | | | | 1753.843 | 878.1 | 1753.1 | |
| I-714 | 131 | | | | 1739.827 | 871.1 | 1739.1 | |
| I-715 | 60.5 | | | | 1739.827 | 871.1 | 1739 | |
| I-716 | 91 | | | | 1745.783 | 874.1 | 1745.1 | |
| I-717 | 39 | | | | 1745.783 | 874.1 | 1745.1 | |
| I-718 | 82 | | | | 1759.799 | 881.1 | 1759.2 | |
| I-719 | 38 | | | | 1759.799 | 881.1 | 1759.1 | |
| I-720 | 75 | | | | 1745.783 | 874.1 | 1745.1 | |
| I-721 | 46 | | | | 1745.783 | 874.1 | 1745.1 | |
| I-722 | 1128 | | | | 1887.948 | 945.3 | 1887.2 | |
| I-723 | 3833 | | | | 1957.932 | 980.3 | 1957.3 | |
| I-724 | 114 | | | | 1911.912 | 957.2 | 1911.2 | |
| I-725 | 5000 | | | | 1957.932 | 1959.2 | 1957.2 | |
| I-726 | 5000 | | | | 1867.885 | 1869.2 | 1867.2 | |
| I-727 | 5000 | | | | 1861.932 | 1863.2 | 1861.2 | |
| I-728 | 289 | | | | 1847.917 | 1849.2 | 1847.2 | |
| I-729 | 56 | | | | 1938.923 | 970.8 | 1938.3 | |
| I-730 | 35 | 11.2 | | | 1938.923 | 970.8 | 1938.2 | |
| I-731 | 34 | 11.6 | | | 1938.923 | 970.8 | 1938.3 | |
| I-732 | 4219 | | | | 1980.97 | 1982.3 | 1980.3 | |
| I-733 | 4261 | | | | 1980.97 | 991.8 | 1980.3 | |
| I-734 | 370 | | | | 1980.97 | 991.7 | 1980.4 | |
| I-735 | 246 | | | | 1980.97 | 991.7 | 1980.3 | |
| I-736 | 440 | | | | 1952.938 | 991.7 | 1980.3 | |
| I-737 | 353 | | | | 1952.938 | 991.7 | 1980.3 | |
| I-738 | 63 | | | | 1947.923 | 1949.5 | 1947.3 | |
| I-739 | 53 | | | | 1947.923 | 1949.6 | 1947.3 | |
| I-740 | 376 | | | | 1989.97 | 1991.7 | 1989.3 | |
| I-741 | 226 | | | | 1989.97 | 1991.6 | 1989.4 | |
| I-742 | 159 | | | | 1989.97 | 1991.7 | 1989.4 | |
| I-743 | 85 | | | | 1961.939 | 1963.7 | 1961.3 | |
| I-744 | 112 | | | | 1876.886 | 1878.5 | 1876.2 | |
| I-745 | 80 | | | | 1876.886 | 1878.5 | 1876.2 | |
| I-746 | 5000 | | | | 1890.901 | 1892.6 | 1890.3 | |
| I-747 | 2388 | | | | 1890.901 | 1892.6 | 1890.3 | |
| I-748 | 54 | | | | 1840.875 | 921.7 | 1840.3 | |
| I-749 | 40 | 9.0 | | | 1840.875 | 921.7 | 1840.2 | |
| I-750 | 43 | 7.4 | | | 1826.859 | 914.7 | 1826.2 | |
| I-751 | 29 | 7.1 | | | 1826.859 | 914.6 | 1826.1 | |
| I-752 | 16 | 9.9 | | | 1853.87 | 928.1 | 1853.2 | |
| I-753 | 14 | 10.0 | | | 1853.87 | 928.1 | 1853.2 | |
| I-754 | 115 | | | | 1840.875 | 921.6 | 1840.1 | |
| I-755 | 88 | | | | 1840.875 | 921.6 | 1840.1 | |
| I-756 | 56 | | | | 1826.859 | 914.6 | 1826.1 | |
| I-757 | 64 | | | | 1853.87 | 928.1 | 1853.1 | |
| I-758 | 47 | | | | 1853.87 | 928.1 | 1853.1 | |
| I-759 | 1534 | | | | 1840.875 | 1842.2 | 1840.1 | |
| I-760 | 608 | | | | 1840.875 | 1842.3 | 1840 | |
| I-761 | 5 | | | | 2027.841 | 2029.1 | 2027 | |
| I-762 | 5 | 14.0 | 7.9 | | 2027.841 | 2029 | 2027 | |
| I-763 | 5 | 21.3 | | | 1930.827 | 1932.1 | 1930 | |
| I-764 | 14 | 30.9 | | | 1930.827 | 1932 | 1930 | |
| I-765 | 228 | | | | 1918.827 | 1920.1 | 1918 | |
| I-766 | 55 | | | | 1918.827 | 1920.1 | 1918 | |
| I-767 | 12 | 37.2 | | | 1930.827 | 1932.1 | 1930 | |
| I-768 | 9 | 31.4 | | | 1930.827 | 1932.1 | 1930.1 | |
| I-769 | 5 | 13.0 | | | 2036.841 | 2038.4 | 2036.1 | |
| I-770 | 5 | 13.7 | | | 2036.841 | 2038.4 | 2036.1 | |
| I-771 | 5 | 37.3 | | | 1939.827 | 1941.5 | 1939.1 | |
| I-772 | 7 | >>20 | | | 1939.827 | 1941.4 | 1939.1 | |
| I-773 | 167 | | | | 1927.827 | 1929.4 | 1927 | |
| I-774 | 38 | | | | 1927.827 | 1929.5 | 1927.1 | |
| I-775 | 6 | >>20 | | | 1939.827 | 1941.4 | 1939.1 | |
| I-776 | 5 | 45.7 | | | 1939.827 | 1941.4 | 1939.1 | |
| I-777 | 5 | 19.8 | | | 1919.855 | 1921.6 | 1919.4 | |
| I-778 | 8 | 11.2 | | | 1916.811 | 1918.3 | 1916.3 | |
| I-779 | 5 | 18.7 | | | 1925.812 | 1927.6 | 1925.2 | |
| I-780 | 9 | 20.7 | | | 1940.865 | 1942.3 | 1940.2 | |
| I-781 | 5 | 31.0 | | | 1949.866 | 1951.5 | 1949.2 | |
| I-782 | 6 | 12.2 | | | 1933.871 | 1935.6 | 1933.2 | |
| I-783 | 7 | 6.2 | | | 1944.816 | 973.9 | 971.8 | |
| I-784 | 6 | 14.5 | | | 1953.816 | 1955.9 | 1953.7 | |
| I-785 | 6 | 21.6 | | | 1788.753 | 895.5 | 1787.9 | |
| I-786 | 8 | 29.3 | | | 1802.768 | 902.5 | 1801.9 | |
| I-787 | 5 | 30.7 | | | 1916.811 | 1918 | 1915.9 | |
| I-788 | 5 | 21.6 | | | 1925.812 | 1927.4 | 1924.9 | |
| I-789 | 19 | >>20 | | | 1919.855 | 1921.2 | 1918.8 | |
| I-790 | 24 | >>20 | | | 1919.855 | 1921.2 | 1918.8 | |
| I-791 | 310 | | | | 1942.812 | 1944.8 | 1943.3 | |
| I-792 | 20 | >>20 | | | 1908.851 | 1910.4 | 1908 | |
| I-793 | 14 | >>20 | | | 1975.827 | 1977.4 | 1975.1 | |
| I-794 | 19 | 26.4 | | | 1969.871 | 1971.4 | 1969 | |
| I-795 | 176 | | | | 1969.871 | 1971.4 | 1968.8 | |
| I-798 | 106 | | | | 1942.812 | 1844.8 | 1942.3 | |
| I-799 | 92 | | | | 1922.866 | 1924.3 | 1921.9 | |
| I-800 | 79 | | | | 1926.841 | 1928.3 | 1925.9 | |
| I-801 | 7 | 5.8 | 4.3 | >20 | 1915.852 | 1917.1 | 1915 | |
| I-802 | 6 | 4.8 | | | 1924.853 | 1926.4 | 1924 | |
| I-803 | 5 | 9.6 | 9.0 | | 1903.816 | 1905 | 1903 | |
| I-804 | 5 | 13.5 | | | 1912.816 | 1914.4 | 1911.9 | |
| I-805 | 5 | 18.5 | | | 1959.854 | 1961.2 | 1959 | |
| I-806 | 5 | 21.6 | | | 1968.854 | 1970.4 | 1968 | |
| I-807 | 5 | 3.2 | | | 1949.837 | 1951.1 | 1949 | |
| I-808 | 5 | 4.4 | | | 1958.837 | 1960.4 | 1958 | |
| I-809 | 5 | 6.1 | 11.3 | | 1903.816 | 1905 | 1902.9 | |
| I-810 | 6 | 18.0 | | | 1912.816 | 1914.4 | 1911.9 | |
| I-811 | 32 | >>20 | | | 1917.807 | 1919.2 | | |
| I-812 | 33 | 48.6 | | | 1923.763 | 1925.2 | | |
| I-813 | 7 | 20.9 | | | 1925.812 | 1927.4 | | |
| I-814 | 7 | 18.9 | 16.5 | | 1889.8 | 946.1 | | |
| I-815 | 5 | 15.4 | 10.3 | | 1875.785 | 939.1 | | |
| I-816 | 5 | 13.7 | | | 1902.796 | 1904 | | |
| I-817 | 10 | | | | 1889.8 | 946 | | |
| I-818 | 6 | 15.0 | | | 1902.796 | 1904 | | |
| I-819 | 5 | 7.5 | | | 1987.848 | 1989 | 1987 | |
| I-820 | 6 | 18.2 | | | 1996.849 | 1998.4 | 1996 | |
| I-821 | 5 | 9.1 | | | 1973.833 | 1975.1 | 1973 | |
| I-822 | 6 | 6.3 | 7.2 | | 1987.848 | 1989 | 1987 | |
| I-823 | 5 | 18.3 | | | 1996.849 | 1998.4 | 1996 | |
| I-824 | 7 | 14.7 | | | 1973.833 | 1975.1 | 1973 | |
| I-825 | 15 | 27.5 | | | 2001.864 | 2003 | 2001 | |
| I-826 | 15 | 22.7 | | | 2001.864 | 1002.1 | 2001 | |
| I-827 | 13 | >>20 | | | 2010.864 | 2012.4 | 2010 | |
| I-828 | 13 | | | | 2010.864 | 1006.7 | 2010 | |
| I-829 | 15 | 30.2 | | | 1987.848 | 1989.1 | 1987 | |
| I-830 | 15 | 38.5 | | | 2001.864 | 1002.2 | 2001 | |
| I-831 | 11 | 25.6 | | | 2001.864 | 1002.2 | 2001 | |
| I-832 | 9 | 39.8 | | | 2010.864 | 2012.3 | 2010 | |
| I-833 | 8 | 48.1 | | | 2010.864 | 2012.3 | 2010 | |
| I-834 | 14 | 33.7 | | | 1987.848 | 1989.1 | 1987 | |
| I-835 | 11 | 37.6 | | | 1987.848 | 1989 | 1987 | |
| I-836 | 11 | 16.9 | | | 1915.827 | 1917.1 | 1915 | |
| I-837 | 5 | 23.8 | | | 1924.828 | 1926.4 | 1924.1 | |
| I-838 | 12 | 17.4 | | | 1929.843 | 1931.1 | 1929.1 | |
| I-839 | 7 | 41.9 | | | 1938.843 | 1940.4 | 1938.9 | |
| I-840 | 16 | 22.3 | | | 1958.87 | 1960.2 | 1958.1 | |
| I-841 | 12 | 34.4 | | | 1967.87 | 1969.4 | 1967.1 | |
| I-842 | 34 | 47.9 | | | 1964.848 | 1966.1 | 1964 | |
| I-843 | 154 | | | | 1973.848 | 1975.5 | 1973.1 | |
| I-844 | 6 | | | | 1902.832 | 1904.1 | 1902.1 | |
| I-845 | 7 | | | | 1911.832 | 1913.5 | 1911 | |
| I-846 | 56 | | | | 1914.868 | 1916.1 | 1914.1 | |
| I-847 | 28 | >>20 | | | 1923.869 | 1925.5 | 1923.1 | |
| I-848 | 13 | 7.0 | | | 2060.866 | 2061.9 | 2059.9 | |
| I-849 | 8 | 3.6 | 1.1 | 9.2 | 2026.882 | 1014.6 | 2026 | |
| I-850 | 26 | 16.4 | | | 2025.868 | 1014.1 | 2025.1 | |
| I-851 | 16 | 7.6 | | | 1991.884 | 997.1 | 1991 | |
| I-852 | 7 | 2.8 | 1.4 | | 2025.868 | 1014.1 | 2025.1 | |
| I-853 | 8 | 6.6 | | | 2025.868 | 1014.1 | 2025.1 | |
| I-854 | 8 | 3.6 | | | 1991.884 | 997.1 | 1991 | |
| I-855 | 22 | | | | 1948.853 | 1949.9 | 1947.9 | |
| I-856 | 17 | 6.8 | | | 1914.868 | 1916 | 1914 | |
| I-857 | 15 | 30.6 | | | 1787.769 | 1788.9 | 1787 | |
| I-858 | 34 | >>20 | | | 1801.784 | | 1800.9 | |
| I-859 | 36 | >>20 | | | 1774.774 | | 1773.9 | |
| I-860 | 61 | | | | 1774.774 | | 1773.9 | |
| I-861 | 40 | | | | 1830.811 | | 1829.9 | |
| I-862 | 123 | | | | 1786.81 | | 1785.9 | |
| I-863 | 22 | >>20 | | | 1810.785 | 1940 | 1937.9 | |
| I-864 | 12 | 40.0 | | | 1938.843 | 1812 | 1809.8 | |
| I-870 | 9.5 | 14.6 | | | 2129.923 | 2131 | 2128.8 | |
| I-871 | 5 | 13.7 | | | 2129.923 | 1917.7 | 1915.7 | |
| I-872 | 9.5 | 14.1 | | | 2129.923 | 2130.7 | 2128.8 | |
| I-873 | 6.5 | 10.0 | | | 2129.923 | 2131 | 2128.8 | |
| I-874 | 18.5 | 14.6 | | | 2086.953 | 1044.6 | 2085.8 | |
| I-875 | 26 | 13.7 | | | 2086.953 | 2087.8 | 2085.8 | |
| I-876 | 24 | 13.2 | | | 2086.953 | 2087.7 | 2085.8 | |
| I-877 | 11 | 15.6 | | | 2086.953 | 2088 | 2085.8 | |
| I-881 | 10 | 23.8 | | | 2015.916 | 1009.2 | 1007 | |
| I-882 | 22 | 41.4 | | | 2015.916 | 1009.1 | 1007.1 | |
| I-883 | 53 | | | | 2241.901 | 1122.1 | 1120.1 | |
| I-884 | 14 | >>20 | | | 2155.942 | 1079.1 | 1077.1 | |
| I-885 | 32 | >>20 | | | 2181.958 | 1092.1 | 1090.1 | |
| I-886 | 22 | >>20 | | | 2100.933 | 1051.6 | 1049.5 | |
| I-887 | 14 | >>20 | | | 2113.964 | 1058.1 | 1056.1 | |
| I-888 | 13 | | | | 2182.027 | 1092.1 | 1090.1 | |
| I-889 | 16 | >>20 | | | 2189.995 | 1096.2 | 1094.1 | |
| I-890 | 16 | >>20 | | | 2176.964 | 1089.6 | 1087.6 | |
| I-891 | 13 | | | | 2134.953 | 1068.6 | 1066.6 | |
| I-892 | 18 | >>20 | | | 2103.932 | 1053 | 1051 | |
| I-893 | 834 | | | | 2103.932 | 1053.6 | 1051.6 | |
| I-894 | 15 | >>20 | | | 2191.985 | 1097.1 | 1095 | |
| I-895 | 14 | >>20 | | | 2280.037 | 1141.1 | 1139.1 | |
| I-896 | 22 | >>20 | | | 2368.089 | 1185.2 | 1183.1 | |
| I-897 | 16 | >>20 | | | 2043.911 | 1023.1 | 1021 | |
| I-898 | 16 | >>20 | | | 2099.974 | 1051.1 | 1049.1 | |
| I-899 | 28 | >>20 | | | 2135.974 | 1069.1 | 1067.1 | |
| I-900 | 33 | >>20 | | | 2178.021 | 4090.1 | 1088.1 | |
| I-901 | 38 | | | | 2164.005 | 1083.1 | 1081.1 | |
| I-902 | 104 | 21.2 | | | 2312.939 | 1157.5 | 1155.4 | |
| I-903 | 33 | 7.8 | | | 2226.979 | 1114.6 | 1112.6 | |
| I-904 | 54 | 20.0 | | | 2252.995 | 1127.6 | 1125.6 | |
| I-905 | 8 | 31.6 | | | 2171.97 | 1087.1 | 1085 | |
| I-906 | 8 | 26.5 | | | 2185.001 | 1093.7 | 1091.6 | |
| I-907 | 9 | 27.8 | | | 2253.064 | 2254.2 | 2252.1 | |
| I-908 | 10 | 26.0 | | | 2261.033 | 2262.1 | 2260.2 | |
| I-909 | 8 | 28.4 | | | 2248.001 | 2249.1 | 2247.4 | |
| I-910 | 10 | 29.8 | | | 2205.99 | 1104.1 | 1102.1 | |
| I-911 | 12 | 22.9 | | | 2174.969 | 1088.6 | 1086.6 | |
| I-912 | 10 | 28.0 | | | 2263.022 | 1132.7 | 1130.6 | |
| I-913 | 10 | 26.4 | | | 2351.074 | 1176.7 | 1174.6 | |
| I-914 | 16 | 38.1 | | | 2439.127 | 1220.7 | 1218.7 | |
| I-915 | 28 | 15.5 | | | 2198.948 | 1107.6 | 1105.6 | |
| I-916 | 28 | 13.6 | | | 2198.948 | 1107.6 | 1105.6 | |
| I-917 | 12 | 19.7 | | | 2114.948 | 1058.6 | 1056.6 | |
| I-918 | 33 | 11.1 | | | 2171.011 | 1086.7 | 1084.6 | |
| I-919 | 28 | 15.2 | | | 2207.011 | 1104.7 | 1102.6 | |
| I-920 | 117 | 17.7 | | | 2249.058 | 1125.7 | 1123.6 | |
| I-921 | 8 | | | | 2055.846 | 1029.2 | 1027.3 | |
| I-922 | 12 | 2.7 | | | 2042.85 | 1022.7 | 1020.6 | |
| I-923 | 27 | 6.0 | | | 2088.871 | 1045.7 | 1043.8 | |
| I-924 | 7 | 3.3 | | | 2099.795 | 1051.5 | 1049.6 | |
| I-925 | 21 | 20.0 | | | 2055.846 | 1029.3 | 1027.2 | |
| I-926 | 43 | 29.9 | | | 2055.846 | 1029.2 | 1027.3 | |
| I-927 | 11 | 8.2 | | | 2089.872 | 1046 | 1044 | |
| I-928 | 21 | 6.1 | | | 2089.872 | 1046 | 1044.1 | |
| I-929 | 23 | 10.3 | | | 2012.876 | 1007.7 | 1005.7 | |
| I-930 | 37 | 13.5 | | | 1999.881 | 1001.3 | 999.3 | |
| I-931 | 221 | | | | 2045.902 | 1024 | 1022 | |
| I-932 | 35 | 11.4 | | | 2056.826 | 1030 | 1027.9 | |
| I-933 | 168 | 22.2 | | | 2012.876 | 1007.8 | 1005.6 | |
| I-934 | 69 | 19.2 | | | 2046.902 | 1024.6 | 1022.6 | |
| I-935 | 8 | 33.1 | | | 2154.943 | 1078.6 | 1076.5 | |
| I-936 | 7 | 22.2 | | | 2198.969 | 1100.6 | 1098.6 | |
| I-937 | 9 | 28.8 | | | 2242.996 | 1122.6 | 1120.6 | |
| I-938 | 9 | 33.5 | | | 2287.022 | 1144.6 | 1142.6 | |
| I-939 | 8 | 25.1 | | | 2044.906 | 1023.6 | 1021.7 | |
| I-940 | 1742 | | | | 1986.814 | 1987.7 | 1985.7 | |
| I-941 | 2111 | | | | 1986.814 | 1987.8 | 1985.8 | |
| I-942 | 1285 | | | | 2000.83 | 2001.7 | 1999.8 | |
| I-943 | 1994 | | | | 2000.83 | 2001.8 | 1999.8 | |
| I-944 | 761 | | | | 1970.819 | 1971.8 | 1969.8 | |
| I-945 | 1079 | | | | 1970.819 | 986.5 | 984.5 | |
| I-946 | 798 | | | | 2012.866 | 2013.9 | 2011.9 | |
| I-947 | 1053 | | | | 2012.866 | 1007.5 | 1005.5 | |
| I-948 | 2433 | | | | 2000.83 | 2001.8 | 1999.7 | |
| I-949 | 2256 | | | | 2000.83 | 2001.8 | 1999.8 | |
| I-950 | 1634 | | | | 2000.83 | 2001.7 | 1999.7 | |
| I-951 | 1471 | | | | 2000.83 | 2001.8 | 1999.8 | |
| I-952 | 1214 | | | | 2062.846 | 2063.8 | 2061.8 | |
| I-953 | 1456 | | | | 2062.846 | 1032.6 | 1030.5 | |
| I-954 | 900 | | | | 1959.803 | 981.1 | 979 | |
| I-955 | 1198 | | | | 1959.803 | 981 | 979 | |
| I-956 | 1086 | | | | 1973.819 | 988 | 986 | |
| I-957 | 1426 | | | | 1973.819 | 988 | 986 | |
| I-958 | 606 | | | | 1973.819 | 988.1 | 986 | |
| I-959 | 881 | | | | 1973.819 | 988 | 986 | |
| I-960 | 336 | | | | 1985.856 | 994 | 992 | |
| I-961 | 357 | | | | 1985.856 | 994.1 | 992.1 | |
| I-962 | 407 | | | | 2019.84 | 1011.1 | 1009 | |
| I-963 | 402 | | | | 2019.84 | 1011.1 | 1009 | |
| I-964 | 1435 | | | | 1973.869 | 988.1 | 986.1 | |
| I-965 | 1780 | | | | 1973.869 | 988.1 | 986.1 | |
| I-966 | 2023 | | | | 1946.858 | 974.6 | 972.5 | |
| I-967 | 1735 | | | | 1946.858 | 974.6 | 972.5 | |
| I-968 | 2981 | | | | 1960.874 | 981.6 | 979.5 | |
| I-969 | 2318 | | | | 1960.874 | 981.7 | 979.5 | |
| I-970 | 1364 | | | | 2006.895 | 1004.6 | 1002.5 | |
| I-971 | 1842 | | | | 2006.895 | 1004.7 | 1002.6 | |
| I-972 | 1819 | | | | 1972.91 | 987.6 | 985.7 | |
| I-973 | 9 | 19.0 | 10.1 | | 1972.91 | 987.7 | 985.6 | |
| I-974 | 1780 | | | | 1905.832 | 954.1 | 952 | |
| I-975 | 2236.5 | | | | 1905.832 | 954.1 | 952 | |
| I-976 | 399 | | | | 1992.843 | 997.6 | 995.5 | |
| I-977 | 875.5 | | | | 1992.843 | 997.6 | 995.6 | |
| I-978 | 112 | | | | 1965.832 | 984.1 | 982.1 | |
| I-979 | 240 | | | | 1965.832 | 984.1 | 982 | |
| I-980 | 221 | | | | 1979.847 | 991.1 | 989 | |
| I-981 | 373.5 | | | | 1979.847 | 991.1 | 989 | |
| I-982 | 190 | | | | 1984.842 | 993.6 | 991.7 | |
| I-983 | 118 | | | | 1984.842 | 993.6 | 991.5 | |
| I-984 | 179 | | | | 1924.805 | 963.5 | 961.5 | |
| I-985 | 430.5 | | | | 1924.805 | 963.6 | 961.4 | |
| I-986 | 136 | | | | 1950.857 | 976.6 | 974.7 | |
| I-987 | 112 | | | | 1950.857 | 976.6 | 974.5 | |
| I-988 | 5 | 13.9 | | | 2054.91 | 2055.7 | 2053.6 | |
| I-989 | 87 | | | | 2070.905 | 1036.5 | 1034.4 | |
| I-990 | 41 | 8.8 | | | 2047.844 | 1025.2 | 1023.1 | |
| I-991 | 51 | | | | 2061.86 | 1032.2 | 1030.2 | |
| I-992 | 59 | | | | 2061.86 | 1032.2 | 1030.2 | |
| I-993 | 18 | 4.9 | 1.8 | 3.6 | 2015.839 | 1009.2 | 1007.4 | |
| I-994 | 121 | | | | 2011.917 | 2013 | 2011 | |
| I-995 | 55 | | | | 1985.865 | 994.2 | 992.1 | |
| I-996 | 21 | 11.3 | 3.6 | | 1999.881 | 1001.2 | 999.2 | |
| I-997 | 154 | | | | 1984.906 | 994 | 992 | |
| I-998 | 127 | | | | 1958.854 | 980.7 | 978.8 | |
| I-999 | 26 | 26.3 | 5.6 | | 1958.854 | 980.7 | 978.6 | |
| I-1000 | 18 | 23.9 | 1.9 | | 1972.87 | 987.7 | 985.5 | |
| I-1001 | 7218 | | | | 2027.841 | 1015 | 1013 | |
| I-1002 | 9 | 29.8 | | | 2097.892 | 1050.2 | 1048.3 | |
| I-1003 | 38 | | | | 2131.877 | 1067.2 | 1065.2 | |
| I-1004 | 5 | 10.6 | | | 2071.84 | 1037.2 | 1035.1 | |
| I-1005 | 42 | | | | 2097.892 | 1050.2 | 1048.2 | |
| I-1006 | 5 | >>20 | | | 2112.903 | 1057.7 | 1055.6 | |
| I-1007 | 6 | 24.9 | | | 2097.892 | 1050.2 | 1048.2 | |
| I-1008 | 9 | 14.0 | 4.7 | | 2131.877 | 1067.2 | 1065.2 | |
| I-1009 | 11 | 33.3 | | | 2071.84 | 1037.2 | 1035.1 | |
| I-1010 | 8 | 13.3 | | | 2097.892 | 1050.3 | 1048.2 | |
| I-1011 | 5 | 20.8 | | | 2112.903 | 1057.7 | 1055.7 | |
| I-1012 | 60 | 37.9 | | | 2187.976 | 1095.3 | 1093.2 | |
| I-1013 | 8 | 12.4 | | | 1931.821 | 967.2 | 964.9 | |
| I-1014 | 19 | 14.3 | | | 1930.837 | 966.7 | 964.6 | |
| I-1015 | 5 | 8.9 | 5.7 | | 1890.794 | 946.6 | 944.4 | |
| I-1016 | 8 | 21.4 | | | 1889.81 | 946.2 | 944.2 | |
| I-1017 | 5 | 8.9 | | | 1917.805 | 960.2 | 958.2 | |
| I-1018 | 26 | 25.8 | | | 1916.821 | 959.7 | 957.7 | |
| I-1019 | 5 | 9.6 | 7.8 | | 1876.779 | 939.7 | 937.8 | |
| I-1020 | 52 | | | | 1875.794 | 939.2 | 937.2 | |
| I-1021 | 5 | 11.5 | | | 1915.85 | 959 | 957 | |
| I-1022 | 33 | 13.7 | | | 1914.866 | 959.8 | 956.5 | |
| I-1023 | 10 | 15.0 | | | 1874.824 | 938.5 | 936.5 | |
| I-1024 | 43 | | | | 1873.84 | 938 | 935.9 | |
| I-1025 | 5 | 23.6 | | | 1917.795 | 960.1 | 958 | |
| I-1026 | 5 | 16.7 | | | 2028.825 | 1015.6 | 1013.6 | |
| I-1028 | 13 | 8.7 | 3.6 | | 1917.805 | 960.2 | 958.2 | |
| I-1029 | 823 | >>20 | | | 1931.821 | 967.2 | 965.1 | |
| I-1030 | 507 | >>20 | | | 1931.821 | 967.2 | 965.1 | |
| I-1031 | 11 | 8.8 | | | 1931.821 | 967.2 | 965 | |
| I-1032 | 15 | 10.4 | | | 1890.794 | 946.7 | 944.5 | |
| I-1033 | 10 | 8.6 | | | 1904.81 | 953.7 | 951.7 | |
| I-1034 | 27 | 9.5 | 4.0 | | 1950.831 | 976.7 | 974.6 | |
| I-1035 | 21 | 10.2 | | | 1916.846 | 959.7 | 957.5 | |
| I-1036 | 29 | 16.6 | | | 1904.81 | 953.7 | 951.7 | |
| I-1037 | 30 | 4.4 | | | 1918.825 | 960.7 | 958.7 | |
| I-1038 | 101 | | | | 1964.846 | 983.7 | 981.6 | |
| I-1039 | 57 | | | | 1930.862 | 966.7 | 964.5 | |
| I-1040 | 8 | 9.3 | | | 1970.832 | 986.7 | 984.8 | |
| I-1041 | 8 | >>20 | | | 1964.785 | 983.7 | 981.6 | |
| I-1042 | 5 | 11.4 | | | 1957.836 | 980.2 | 978.2 | |
| I-1043 | 12 | >>20 | | | 1951.789 | 977.2 | 975.2 | |
| I-1044 | 5 | 17.6 | 14.5 | | 1943.821 | 973.2 | 971.3 | |
| I-1045 | 5 | 23.9 | | | 1937.774 | 970.2 | 968.2 | |
| I-1046 | 5 | 20.5 | | | 1929.805 | 966.2 | 964.1 | |
| I-1047 | 5 | 28.4 | | | 1923.758 | 963.2 | 961 | |
| I-1048 | 5 | 8.8 | | | 1916.81 | 959.7 | 957.6 | |
| I-1049 | 6 | | | | 1910.763 | 956.6 | 954.5 | |
| I-1050 | 5 | 24.8 | | | 1902.794 | 952.7 | 950.5 | |
| I-1051 | 14 | >>20 | | | 1896.747 | 949.6 | 947.5 | |
| I-1061 | 6 | 10.3 | | | 2141.955 | 1072.5 | 1070.2 | |
| I-1062 | 11 | 4.7 | | | 1943.857 | 973.3 | 971.2 | |
| I-1063 | 471 | | | | 1957.873 | 911.7 | 909.7 | |
| I-1064 | 414 | | | | 1902.831 | 952.7 | 950.5 | |
| I-1065 | 520 | | | | 1902.831 | 952.6 | 950.5 | |
| I-1066 | 789 | | | | 1916.846 | 959.7 | 957.7 | |
| I-1067 | 517 | | | | 1916.846 | 959.7 | 957.5 | |
| I-1068 | 950 | | | | 1916.846 | 959.7 | 957.4 | |
| I-1069 | 920 | | | | 1916.846 | 959.7 | 957.8 | |
| I-1070 | 1022 | | | | 1930.862 | 966.7 | 964.7 | |
| I-1071 | 1261 | | | | 1930.862 | 966.8 | 964.7 | |
| I-1072 | 10 | 10.5 | | | 1909.896 | 956 | 953.8 | |
| I-1073 | 409 | | | | 1923.912 | 963.1 | 961 | |
| I-1074 | 498 | | | | 1923.912 | 963.1 | 961 | |
| I-1075 | 567 | | | | 1969.873 | 986.2 | 984.4 | |
| I-1076 | 448 | | | | 1969.873 | 986.3 | 984.2 | |
| I-1077 | 324 | | | | 1983.888 | 993.3 | 991.3 | |
| I-1078 | 352 | | | | 1983.888 | 993.3 | 991.4 | |
| I-1079 | 5 | 19.7 | | | 1972.847 | 987.8 | 985.8 | |
| I-1080 | 6 | >>20 | 10.4 | | 1916.846 | 959.8 | 957.7 | |
| I-1081 | 5 | 16.7 | 10.6 | | 1874.799 | 1876.3 | 1874.2 | |
| I-1082 | 5 | 14.1 | | | 1904.81 | 1906.3 | 1904.2 | |
| I-1083 | 8 | 18.8 | | | 1950.831 | 976.9 | 975 | |
| I-1084 | 368 | | | | 1900.815 | 951.9 | 949.8 | |
| I-1086 | 12 | 10.1 | | | 1888.851 | 1890.3 | 1888.3 | |
| I-1087 | 9 | 9.3 | | | 1888.851 | 1890.3 | 1888.4 | |
| I-1088 | 22 | 6.3 | | | 1902.867 | 1904.3 | 1902.4 | |
| I-1089 | 12 | 8.9 | | | 1902.867 | 1904.3 | 1902.5 | |
| I-1090 | 18 | 6.1 | | | 1861.84 | 1863 | 1861 | |
| I-1091 | 27 | 11.4 | | | 1875.856 | 1877 | 1875 | |
| I-1092 | 26 | 7.7 | | | 1861.84 | 1863 | 1861 | |
| I-1093 | 43 | | | | 1875.856 | 1877 | 1875 | |
| I-1094 | 46 | | | | 1875.856 | 1877 | 1875 | |
| I-1095 | 15 | >>20 | | | 1900.888 | 1902 | 1900 | |
| I-1096 | 17 | 8.6 | | | 1914.903 | 1916.4 | 1914.4 | |
| I-1097 | 40 | >>20 | | | 1873.877 | 1875 | 1873 | |
| I-1098 | 100 | | | | 1887.892 | 945 | 943 | |
| I-1099 | 9 | 9.0 | | | 1842.817 | 922.6 | 920.5 | |
| I-1100 | 16 | 24.3 | | | 1868.833 | 935.6 | 1868.2 | |
| I-1101 | 14 | 27.0 | | | 1860.808 | 931.6 | 929.6 | |
| I-1102 | 16 | 27.2 | | | 1886.824 | 944.6 | 942.6 | |
| I-1103 | 15 | 16.7 | | | 1872.828 | 937.6 | 935.6 | |
| I-1104 | 10 | 17.7 | | | 1898.844 | 950.6 | 948.7 | |
| I-1105 | 36 | >>20 | | | 1848.864 | 925.7 | 923.6 | |
| I-1106 | 23 | >>20 | | | 1848.864 | 925.6 | 923.6 | |
| I-1107 | 18 | 11.8 | | | 2009.904 | 1006.4 | 1004.5 | |
| I-1108 | 18 | >>20 | | | 1987.789 | 995.3 | 993.3 | |
| I-1109 | 24 | >>20 | | | 1987.789 | 995.4 | 993.4 | |
| I-1110 | 38 | >>20 | | | 2013.841 | 1008.4 | 1006.1 | |
| I-1111 | 28 | >>20 | | | 2013.841 | 1008.5 | 1006.1 | |
| I-1112 | 40 | | | | 1928.846 | 965.9 | 963.8 | |
| I-1113 | 64 | | | | 1968.877 | 986 | 984 | |
| I-1114 | 20 | >>20 | | | 1960.779 | 981.8 | 979.9 | |
| I-1115 | 28 | 24.3 | | | 1960.779 | 981.8 | 979.9 | |
| I-1116 | 40 | | | | 1972.815 | 987.9 | 986 | |
| I-1117 | 55 | | | | 1972.815 | 987.9 | 985.8 | |
| I-1118 | 24 | 29.5 | | | 1973.831 | 988.4 | 986.3 | |
| I-1119 | 26 | 19.4 | | | 2011.808 | 1007.3 | 1005.3 | |
| I-1120 | 85 | >>20 | | | 2011.808 | 1007.4 | 1005.3 | |
| I-1121 | 18 | 9.2 | | | 1973.868 | 988.4 | 986.1 | |
| I-1122 | 34 | 12.3 | | | 2011.844 | 1007.4 | 1005.4 | |
| I-1123 | 64 | 28.5 | | | 2011.844 | 1007.4 | 1005.5 | |
| I-1124 | 12 | >>20 | | | 1939.87 | 971.2 | 969.2 | |
| I-1125 | 16 | >>20 | | | 1977.847 | 990.2 | 988.2 | |
| I-1126 | 32 | 26.8 | | | 1977.847 | 990.2 | 988.2 | |
| I-1127 | 18 | 5.4 | | | 1939.907 | 971.2 | 969.2 | |
| I-1128 | 20 | 8.1 | | | 1977.883 | 990.2 | 988.2 | |
| I-1129 | 39 | | | | 1977.883 | 990.2 | 988.1 | |
| I-1130 | 6 | 7.6 | | | 1986.899 | 1988.7 | 1986.7 | |
| I-1131 | 7 | 18.8 | | | 2043.921 | 2045.7 | 2043.8 | |
| I-1132 | 21 | >>20 | | | 2043.921 | 2045.7 | 2043.5 | |
| I-1133 | 5 | | | | 1972.847 | 1974.8 | 1973.4 | |
| I-1134 | 6 | | | | 1972.847 | 1974.8 | 1972.6 | |
| I-1135 | 20 | | | | 1916.81 | 959.8 | | |
| I-1136 | 16 | 14.9 | | | 1916.81 | 959.8 | 957.7 | |
| I-1137 | 8 | 12.0 | | | 1916.81 | 959.8 | 1916.7 | |
| I-1138 | 18 | 19.8 | | | 1928.846 | 1953.4 | 1929.5 | |
| I-1139 | 22 | 18.0 | | | 1942.862 | 972.9 | 1942.8 | |
| I-1140 | 33 | 32.5 | | | 1942.862 | 972.9 | 1943.5 | |
| I-1141 | 13 | 27.3 | | | 1910.763 | 956.8 | 1911.3 | |
| I-1142 | 22 | >>20 | | | 1910.763 | 956.8 | 1911.3 | |
| I-1143 | 12 | 33.1 | | | 1910.763 | 956.7 | 1911.4 | |
| I-1144 | 28 | 32.8 | | | 1922.799 | 962.9 | 1922.9 | |
| I-1145 | 18 | 30.6 | | | 1936.815 | 969.8 | 1936.5 | |
| I-1146 | 33 | >>20 | | | 1936.815 | 969.8 | 1935.6 | |
| I-1147 | 10 | 21.1 | | | 1985.868 | 994.3 | 1986.5 | |
| I-1148 | 50 | 21.5 | | | 1985.868 | 994.2 | 1986.3 | |
| I-1149 | 70 | | | | 2027.915 | 1015.4 | 2027.7 | |
| I-1150 | 12 | 21.4 | | | 1958.857 | 980.8 | 978.6 | |
| I-1151 | 30 | 25.3 | | | 1958.857 | 980.8 | 978.9 | |
| I-1152 | 65 | 14.2 | | | 2000.904 | 2003 | 2001 | |
| I-1153 | 12 | >>20 | | | 1979.821 | 991.3 | 989.1 | |
| I-1154 | 45 | | | | 1979.821 | 991.3 | 989.4 | |
| I-1155 | 60 | | | | 2021.868 | 1012.3 | 1010.6 | |
| I-1156 | 14 | 26.1 | | | 1952.81 | 977.8 | 975.9 | |
| I-1157 | 36 | >>20 | | | 1952.81 | 977.8 | 1953.2 | |
| I-1158 | 168 | | | | 1994.857 | 998.9 | 1995.2 | |
| I-1159 | 61 | | | | 1930.827 | 1932.2 | 1930.3 | |
| I-1160 | 575 | | | | 1930.827 | 1932.3 | 1930.4 | |
| I-1161 | 24 | >>20 | | | 2041.857 | 2043.2 | 2041.3 | |
| I-1162 | 1534 | | | | 2041.857 | 2061.4 | | |
| I-1163 | 691 | | | | 1887.858 | 1889.2 | 1887.3 | |
| I-1164 | 162 | | | | 1887.858 | 1889.2 | 1887.2 | |
| I-1165 | 722 | | | | 1887.858 | 1907.2 | | |
| I-1166 | 14 | 14.6 | | | 1889.837 | 1891.1 | 1889.2 | |
| I-1167 | 34 | 11.7 | | | 1901.873 | 1903.2 | 1901.2 | |
| I-1168 | 25 | 31.4 | | | 1917.841 | 960.3 | 958.3 | |
| I-1169 | 159 | | | | 1929.878 | 1931.6 | 1929.6 | |
| I-1170 | 15 | 13.5 | | | 1848.81 | 925.6 | 923.7 | |
| I-1171 | 70 | 28.8 | | | 1860.847 | 931.6 | 1860.2 | |
| I-1172 | 45 | 19.4 | | | 1888.851 | 939.8 | 937.7 | |
| I-1173 | 12 | 17.2 | | | 1915.852 | 959.2 | 1915.2 | |
| I-1174 | 43 | 32.6 | | | 1927.889 | 965.2 | 1927.2 | |
| I-1175 | 24 | 27.3 | | | 1943.857 | 973.3 | 971.5 | |
| I-1176 | 169 | | | | 1955.893 | 979.2 | 977.3 | |
| I-1177 | 25 | 4.3 | | | 1929.868 | 1931.4 | 1929.4 | |
| I-1178 | 54.5 | 28.8 | | | 1929.868 | 1931.3 | 1929.4 | |
| I-1179 | 346 | | | | 1943.884 | 1945.3 | 1943.4 | |
| I-1180 | 87 | | | | 1943.884 | 1945.2 | 1943.3 | |
| I-1181 | 297 | >>20 | | | 1849.806 | 1851.2 | 1849.3 | |
| I-1182 | 144.5 | | | | 1850.764 | 1852 | 1850.1 | |
| I-1183 | 409 | | | | 1878.769 | 940.8 | 938.8 | |
| I-1184 | 175.5 | | | | 1850.763 | 926.7 | 924.8 | |
| I-1185 | 203 | 26.9 | | | 1999.849 | 1001.1 | 999.1 | |
| I-1186 | 127.5 | 23.6 | | | 2000.808 | 1001.6 | 999.6 | |
| I-1187 | 80.5 | 28.6 | | | 1972.802 | 987.6 | 985.5 | |
| I-1188 | 22.5 | 7.2 | | | 1872.883 | 1874.1 | 1872.2 | |
| I-1189 | 94.5 | | | | 1859.861 | 931 | 1860 | |
| I-1190 | 58.5 | | | | 1831.857 | 917 | 1832 | |
| I-1191 | 38.5 | | | | 1845.872 | 924 | 1845 | |
| I-1192 | 81.5 | | | | 1910.883 | 957 | 955 | |
| I-1193 | 78.5 | | | | 1882.879 | 1884 | 1882 | |
| I-1194 | 66.5 | | | | 1909.888 | 1911.6 | 1909.6 | |
| I-1195 | 29.5 | 16.2 | | | 1881.883 | 1883.5 | 1881.2 | |
| I-1196 | 85 | | | | 1873.877 | 1898 | 1874 | |
| I-1197 | 44 | | | | 1845.872 | 1869 | 1845 | |
| I-1198 | 65 | | | | 1900.888 | 952 | 950 | |
| I-1199 | 44.5 | | | | 1872.883 | 1874 | 1872 | |
| I-1200 | 99 | >>20 | | | 1940.848 | 971.7 | 969.6 | |
| I-1201 | 13 | 19.6 | | | 1940.848 | 971.7 | 969.7 | |
| I-1202 | 16 | 16.3 | | | 1940.848 | 971.7 | 969.6 | |
| I-1203 | 16 | 10.0 | | | 1934.891 | 1936.3 | 1934.4 | |
| I-1204 | 81 | | | | 1934.891 | 1936.2 | 1934.2 | |
| I-1205 | 987 | | | | 1934.891 | 1936.2 | 1934.2 | |
| I-1206 | 32 | 27.8 | | | 1915.827 | 959.2 | 957.1 | |
| I-1207 | 40 | 7.5 | | | 1914.868 | 958.7 | 1914.3 | |
| I-1208 | 349 | | | | 1888.816 | 945.7 | 1988.1 | |
| I-1209 | 479 | | | | 1887.858 | 1889.2 | 1887.3 | |
| I-1210 | 56 | | | | 1929.843 | 966.2 | 1929.2 | |
| I-1211 | 115 | | | | 1928.884 | 1930.2 | 1928.3 | |
| I-1212 | 8663 | | | | 1914.868 | 1916.2 | 1914.2 | |
| I-1213 | 10000 | | | | 1913.91 | 1915.3 | 1913.3 | |
| I-1214 | 116 | | | | 1902.832 | 1904.2 | 1902.2 | |
| I-1215 | 216 | | | | 1901.873 | 1903.2 | 1901.2 | |
| I-1216 | 10000 | | | | 1901.848 | 1903.4 | 1901.3 | |
| I-1217 | 10000 | | | | 1900.889 | 1902.3 | 1900.2 | |
| I-1218 | 10 | >>20 | | | 1952.778 | 1954.2 | 1952.2 | |
| I-1219 | 7 | >>20 | | | 2063.808 | 2065.2 | 2063.3 | |
| I-1220 | 11 | 17.3 | | | 1915.827 | 1917.1 | 1915.2 | |
| I-1221 | 14 | 23.4 | | | 1914.868 | 1916.3 | 1914.4 | |
| I-1222 | 511 | | | | 1888.816 | 945.7 | 943.7 | |
| I-1223 | 550 | | | | 1887.858 | 1889.3 | 1887.3 | |
| I-1224 | 389 | | | | 1929.843 | 1931.1 | 1929.1 | |
| I-1225 | 305 | | | | 1928.884 | 1930.3 | 1928.4 | |
| I-1226 | 559 | | | | 1914.868 | 958.8 | 956.7 | |
| I-1227 | 10000 | | | | 1913.91 | 1915.3 | 1913.3 | |
| I-1228 | 100 | | | | 1902.832 | 1904.2 | 1902.2 | |
| I-1229 | 134 | | | | 1901.873 | 1903.2 | 1901.3 | |
| I-1230 | 10000 | | | | 1901.848 | 952.3 | 950.3 | |
| I-1231 | 10000 | | | | 1900.889 | 1902.3 | 1900.2 | |
| I-1232 | 31 | 43.3 | | | 1897.86 | 1899.2 | 1897.2 | |
| I-1233 | 24 | 54.5 | | | 1897.86 | 1899.1 | 1897.2 | |
| I-1234 | 41 | 23.9 | | | 1909.896 | 1911.2 | 1909.3 | |
| I-1235 | 27 | 24.8 | | | 1909.896 | 1911.2 | 1909.3 | |
| I-1236 | 69 | 20.9 | | | 1937.901 | 1939.7 | 1937.7 | |
| I-1237 | 31 | 39.9 | | | 1937.901 | 1939.6 | 1937.6 | |
| I-1238 | 44 | 23.1 | | | 1868.87 | 935.7 | 1868.2 | |
| I-1239 | 33 | 31.8 | | | 1868.87 | 935.7 | 1868.2 | |
| I-1240 | 33 | 11.5 | | | 2070.882 | 1037 | 1035 | |
| I-1241 | 19 | 15.7 | | | 2002.844 | 1002.9 | 1000.9 | |
| I-1242 | 30 | >>20 | 3.8 | | 1972.834 | 987.9 | 986 | |
| I-1243 | 82 | | | | 2014.881 | 2017 | 2015 | |
| I-1244 | 18 | 17.7 | 15.9 | | 1918.825 | 960.9 | 959 | |
| I-1245 | 9 | 12.2 | 4.1 | | 1891.815 | 947.4 | 945.8 | |
| I-1246 | 13 | 24.3 | 16.2 | | 1861.804 | 932.4 | 1862.5 | |
| I-1247 | 33 | >>20 | | | 1903.851 | 953.4 | 951.5 | |
| I-1248 | 19 | 29.7 | | | 1971.888 | 987.5 | 985.5 | |
| I-1249 | 17 | 25.2 | | | 1903.851 | 953.4 | 951.3 | |
| I-1250 | 31 | >>20 | | | 1873.84 | 938 | 936 | |
| I-1251 | 1940 | | | | 1915.887 | 957 | 959 | |
| I-1252 | 546 | | | | 2001.899 | 1002.5 | 1000.3 | |
| I-1253 | 14 | >>20 | | | 2005.857 | 1004.5 | 1002.4 | |
| I-1254 | 530 | | | | 1972.945 | 988 | 986 | |
| I-1255 | 32 | >>20 | | | 1976.904 | 989.9 | 987.7 | |
| I-1256 | 1466 | | | | 1903.789 | 932 | 930 | |
| I-1257 | 11 | | | | 2006.858 | 2008.3 | 2006.3 | |
| I-1258 | 17 | >>20 | | | 1953.772 | 978.4 | 976.4 | |
| I-1259 | 10 | 18.1 | | | 1961.831 | 982.4 | 980.3 | |
| I-1260 | 23 | 24.0 | | | 1924.818 | 964 | 961.9 | |
| I-1261 | 31 | 19.8 | | | 1932.877 | 967.9 | 965.9 | |
| I-1262 | 1124 | | | | 1889.872 | 946.4 | 944.3 | |
| I-1263 | 43 | 20.0 | | | 1842.854 | 922.7 | 920.6 | |
| I-1264 | 157 | >>20 | | | 1884.901 | 943.8 | 941.6 | |
| I-1265 | 152 | 22.7 | | | 1884.901 | 943.7 | 941.8 | |
| I-1266 | 755 | >>20 | | | 1892.87 | 947.7 | 945.6 | |
| I-1267 | 181 | 36.9 | | | 1892.87 | 947.7 | 945.8 | |
| I-1268 | 198 | 28.4 | | | 1910.841 | 956.7 | 954.7 | |
| I-1269 | 173 | 17.6 | | | 1892.87 | 947.7 | 945.8 | |
| I-1270 | 3699 | | | | 1892.87 | 947.7 | 945.7 | |
| I-1271 | 682 | | | | 1910.841 | 956.7 | 954.5 | |
| I-1272 | 331 | | | | 1836.897 | 919.7 | 917.7 | |
| I-1273 | 9 | >>20 | | | 2003.915 | 1003.6 | 1001.4 | |
| I-1274 | 13 | >>20 | | | 2015.951 | 2018.1 | 2016.4 | |
| I-1275 | 9 | 27.8 | | | 2042.962 | 2045 | 2042.9 | |
| I-1276 | 10 | >>20 | | | 2015.951 | 2018.1 | 2015.9 | |
| I-1277 | 17 | >>20 | | | 2027.987 | 2029.9 | 2027.9 | |
| I-1278 | 10 | 18.0 | | | 2000.915 | 2003.1 | 2001.6 | |
| I-1279 | 12 | 22.9 | | | 1973.904 | 1976 | 1974.5 | |
| I-1280 | 22 | 24.7 | | | 1985.94 | 1988.1 | 1985.9 | |
| I-1281 | 10 | 22.2 | | | 2014.931 | 2017 | 2015.5 | |
| I-1282 | 34 | 43.1 | | | 1987.92 | 995.6 | 993.6 | |
| I-1283 | 26 | 38.6 | | | 1999.956 | 2002.1 | 1999.9 | |
| I-1284 | 10000 | | | | 1894.933 | 1896.5 | 1894.6 | |
| I-1285 | 10000 | | | | 1894.933 | 1896.4 | 1894.5 | |
| I-1286 | 10000 | | | | 1838.87 | 1840.3 | 1838.4 | |
| I-1287 | 10000 | | | | 1838.87 | 1840.3 | 1838.4 | |
| I-1288 | 1164 | | | | 1994.038 | 1995.7 | 1993.6 | |
| I-1289 | 10000 | | | | 1994.038 | 1995.5 | 1993.4 | |
| I-1290 | 10000 | | | | 1888.976 | 1890.3 | 1888.4 | |
| I-1291 | 10000 | | | | 1888.976 | 1890.2 | 1888.3 | |
| I-1292 | 10000 | | | | 1888.976 | 1890.3 | 1888.4 | |
| I-1293 | 10000 | | | | 1867.922 | 935.2 | 1867.3 | |
| I-1294 | 10000 | | | | 1894.933 | 1896.3 | 1894.3 | |
| I-1295 | 10000 | | | | 1838.87 | 1840.2 | 1838.2 | |
| I-1296 | 3785 | | | | 1838.87 | 1840.2 | 1838.3 | |
| I-1297 | 10000 | | | | 1994.038 | 1995.6 | 1993.4 | |
| I-1298 | 10000 | | | | 1888.976 | 1890.3 | 1888.3 | |
| I-1299 | 10000 | | | | 1867.922 | 935.2 | 1837.3 | |
| I-1300 | 10000 | | | | 1867.922 | 935.2 | 1867.3 | |
| I-1301 | 10000 | | | | 1893.949 | 1895.2 | 1893.3 | |
| I-1302 | 45 | 21.4 | 4.0 | | 1875.846 | 1877.2 | 1875.3 | |
| I-1303 | 86 | 9.1 | | | 1909.831 | 1911.2 | 1909.2 | |
| I-1304 | 31 | 33.6 | | | 1874.862 | 1876.3 | 1874.3 | |
| I-1305 | 6 | 9.7 | | | 1863.81 | 1865.2 | 1863.2 | |
| I-1306 | 6 | 6.6 | | | 1863.81 | 1865.2 | 1863.2 | |
| I-1307 | 21 | 38.8 | | | 1929.867 | 1932 | 1930 | |
| I-1308 | 25 | 11.9 | | | 1848.845 | 1851 | 1849 | |
| I-1309 | 59 | 28.6 | | | 1877.835 | 1879.6 | 1877.6 | |
| I-1310 | 124 | >>20 | | | 1903.851 | 953.4 | 951.4 | |
| I-1311 | 38 | 20.6 | | | 1937.835 | 1939.6 | 1937.5 | |
| I-1312 | 14 | 16.1 | | | 1917.83 | 960.3 | 958.7 | |
| I-1313 | 12 | 51.4 | | | 2002.956 | 2005.1 | 2003.6 | |
| I-1314 | 9 | >>20 | | | 1953.861 | 1955.2 | 1953.2 | |
| I-1315 | 13 | 7.2 | | | 1952.902 | 1954.3 | 1952.3 | |
| I-1316 | 11 | 6.8 | | | 1986.886 | 1988.3 | 1986.3 | |
| I-1317 | 9 | 9.7 | | | 1978.842 | 1980.2 | 1978.2 | |
| I-1318 | 14 | 4.8 | 3.9 | | 1977.883 | 1979.1 | 1977.2 | |
| I-1319 | 10 | 4.2 | 2.1 | | 2011.868 | 2013.2 | 2011.3 | |
| I-1320 | 10 | 26.2 | | | 1928.846 | 1929.2 | 1927.2 | |
| I-1321 | 8 | 10.9 | | | 1927.887 | 1930.2 | 1928.3 | |
| I-1322 | 11 | 9.1 | | | 1961.871 | 1963.2 | 1961.2 | |
| I-1323 | 6 | 11.7 | | | 1988.765 | 1991.1 | 1989.2 | |
| I-1324 | 14 | 5.8 | | | 1987.807 | 1990.5 | 1988.6 | |
| I-1325 | 14 | 5.7 | | | 2021.791 | 2024.5 | 2022.7 | |
| I-1326 | 12 | 6.2 | | | 1957.896 | 1959.5 | 1957.6 | |
| I-1327 | 13 | 7.0 | | | 1939.907 | 1941.4 | 1939.6 | |
| I-1328 | 11 | 5.4 | | | 1973.891 | 1975.5 | 1973.5 | |
| I-1329 | 23 | 35.0 | | | 1916.902 | 1918.4 | 1916.5 | |
| I-1330 | 104 | | | | 1915.943 | 1917.5 | 1915.6 | |
| I-1331 | 75 | | | | 1949.927 | 1951.4 | 1949.5 | |
| I-1332 | 11 | 2.5 | 0.9 | | 2019.888 | 1011.5 | 1009.2 | |
| I-1333 | 20 | 2.8 | 1.2 | | 1978.862 | 991 | 1979.1 | |
| I-1334 | 30 | 4.2 | 2.2 | | 1979.882 | 991.4 | 1980.7 | |
| I-1335 | 11 | 2.2 | 0.9 | >20 | 2053.915 | 1028.3 | 1026.2 | |
| I-1336 | 29 | 2.7 | 0.7 | | 2012.888 | 1007.7 | 1005.8 | |
| I-1337 | 85 | 6.2 | | | 2013.909 | 1008.3 | 1006.6 | |
| I-1338 | 10 | 3.6 | 3.4 | | 2053.873 | 1028.5 | 1026.7 | |
| I-1339 | 33 | 5.2 | | | 2012.846 | 1008 | 1006.2 | |
| I-1340 | 159 | 6.8 | | | 2013.867 | 1008.5 | 1005.9 | |
| I-1341 | 17 | 3.5 | 3.2 | | 2087.899 | 1045.3 | 1043.6 | |
| I-1342 | 35 | 7.0 | | | 2046.873 | 1024.8 | 2046.5 | |
| I-1343 | 150 | | | | 2047.893 | 2049.6 | 2047.2 | |
| I-1344 | 11 | 4.1 | | | 1915.852 | 1917.4 | 1915.4 | |
| I-1345 | 15 | 4.7 | | | 1949.837 | 1951.4 | 1949.5 | |
| I-1346 | 2319 | | | | 1910.855 | 1912.4 | 1910.5 | |
| I-1347 | 2369 | | | | 1909.896 | 1911.4 | 1909.4 | |
| I-1348 | 1181 | | | | 1943.88 | 1945.4 | 1943.5 | |
| I-1349 | 161 | | | | 1924.871 | 1926.4 | 1924.4 | |
| I-1350 | 158 | | | | 1923.912 | 1925.4 | 1923.4 | |
| I-1351 | 258 | | | | 1957.896 | 1959.4 | 1957.5 | |
| I-1352 | 12 | 19.5 | | | 1902.886 | 1904.4 | 1902.5 | |
| I-1353 | 18 | 8.8 | | | 1901.927 | 1903.4 | 1901.4 | |
| I-1354 | 48 | | | | 1913.891 | 1915.3 | 1912.7 | |
| I-1355 | 213 | | | | 1926.911 | 964.7 | 1926.4 | |
| I-1356 | 23 | >>20 | | | 1905.828 | 954.2 | 1905.4 | |
| I-1357 | 10 | 33.6 | | | 1886.844 | 944.7 | 1886.5 | |
| I-1358 | 19 | | | | 1980.97 | 1982.4 | 1980.5 | |
| I-1359 | 88 | | | | 1980.97 | 1982.4 | 1980.4 | |
| I-1360 | 135 | | | | 1993.99 | 998 | 996 | |
| I-1361 | 39 | >>20 | | | 1972.907 | 1974.4 | 1972.5 | |
| I-1362 | 23 | 19.6 | | | 1953.922 | 1955.4 | 1953.5 | |
| I-1363 | 9 | 5.5 | | | 2017.824 | 1010.2 | 2017.6 | |
| I-1364 | 9 | 10.5 | | | 2017.824 | 2019.4 | 2017.5 | |
| I-1365 | 9 | 9.7 | | | 2017.824 | 2019.4 | 2017.5 | |
| I-1366 | 7 | 7.5 | | | 1977.841 | 1979.8 | 1977.9 | |
| I-1367 | 31 | 7.8 | | | 2045.829 | 2047.8 | 2045.9 | |
| I-1368 | 44 | 14.2 | | | 2045.829 | 2047.8 | 2046.6 | |
| I-1369 | 29 | 9.9 | | | 2045.829 | 2047.8 | 2045.9 | |
| I-1370 | 18 | 10.0 | | | 1977.818 | 1979.4 | 1977.5 | |
| I-1371 | 22 | 10.9 | | | 1977.818 | 1979.4 | 1977.5 | |
| I-1372 | 29 | 10.2 | | | 1977.818 | 1979.4 | 1977.6 | |
| I-1373 | 5 | 18.3 | | | 1972.874 | 1974.6 | 1972.5 | |
| I-1374 | 17 | 8.8 | | | 1998.89 | 2000.5 | 1998.5 | |
| I-1375 | 7 | 18.5 | | | 1956.843 | 1958.5 | 1956.4 | |
| I-1376 | 4208 | | | | 1937.975 | 1939.7 | 1937.6 | |
| I-1377 | 1003 | | | | 1938.011 | 1939.6 | 1937.6 | |
| I-1378 | 6171 | | | | 1910.964 | 1912.7 | 1910.6 | |
| I-1379 | 1435 | | | | 1964.986 | 1966.7 | 1964.6 | |
| I-1380 | 10000 | | | | 1965.022 | 1966.6 | 1964.6 | |
| I-1381 | 10000 | | | | 1932.019 | 1933.7 | 1931.6 | |
| I-1382 | 2853 | | | | 1937.975 | 1939.6 | 1937.6 | |
| I-1383 | 1655 | | | | 1938.011 | 1939.6 | 1937.7 | |
| I-1384 | 10000 | | | | 1910.964 | 1912.5 | 1910.5 | |
| I-1385 | 1082 | | | | 1964.986 | 1966.8 | 1964.6 | |
| I-1386 | 2248 | | | | 1965.022 | 1966.6 | 1964.6 | |
| I-1387 | 6938 | | | | 1932.019 | 1933.6 | 1931.6 | |
| I-1388 | 18 | 11.3 | | | 1854.89 | 1856.7 | 1854.8 | |
| I-1389 | 9 | 9.2 | | | 1860.847 | 1862.6 | 1860.7 | |
| I-1390 | 16 | 6.6 | | | 1820.841 | 1822.6 | 1820.6 | |
| I-1391 | 11 | 35.0 | | | 1873.842 | 1875.5 | 1873.7 | |
| I-1392 | 13 | 18.3 | | | 1860.847 | 1862.5 | 1860.6 | |
| I-1393 | 34 | 18.6 | | | 1820.841 | 1822.5 | 1820.7 | |
| I-1394 | 9 | 15.9 | | | 1901.847 | 1903.8 | 1901.8 | |
| I-1395 | 33 | 15.4 | | | 1888.851 | 945.9 | 943.9 | |
| I-1396 | 33 | 15.3 | | | 1935.873 | 1937.4 | 1935.5 | |
| I-1397 | 48 | 16.4 | | | 1922.878 | 1924.4 | 1922.5 | |
| I-1398 | 73 | | | | 1882.871 | 1884 | 1882 | |
| I-1399 | 13 | 17.4 | | | 1901.837 | 1903.4 | 1901.6 | |
| I-1400 | 5 | 20.3 | | | 1901.837 | 1903.4 | 1901.5 | |
| I-1401 | 5 | 21.4 | | | 1901.837 | 1903.4 | 1901.5 | |
| I-1402 | 9 | 27.1 | | | 1895.88 | 1897.5 | 1895.5 | |
| I-1403 | 6 | 29.1 | | | 1895.88 | 1897.4 | 1895.5 | |
| I-1404 | 113 | 36.8 | | | 1895.88 | 1897.4 | 1895.5 | |
| I-1405 | 9 | 40.1 | | | 1895.88 | 1897.4 | 1895.5 | |
| I-1406 | 6 | 5.0 | | | 1977.868 | 1979.4 | 1977.5 | |
| I-1407 | 5 | 4.2 | | | 1977.868 | 1979.5 | 1977.6 | |
| I-1408 | 33 | 6.0 | | | 1977.868 | 1979.4 | 1977.6 | |
| I-1409 | 74 | 24.0 | | | 1900.878 | 952 | 1901 | |
| I-1410 | 80 | 29.3 | | | 1886.862 | 945 | 1987 | |
| I-1411 | 109 | 47.1 | | | 1886.862 | 945 | 1987 | |
| I-1412 | 79 | >>20 | | | 1886.862 | 945 | 1987 | |
| I-1413 | 74 | | | | 1887.821 | 945.3 | 943.3 | |
| I-1414 | 84 | >>20 | | | 1860.81 | 931.8 | 929.8 | |
| I-1415 | 72 | | | | 1874.826 | 938.8 | 1874.4 | |
| I-1416 | 57 | | | | 1928.883 | 966 | 1929 | |
| I-1417 | 198 | | | | 1928.883 | 1953 | 1929 | |
| I-1418 | 106 | >>20 | | | 1914.867 | 959 | 1916 | |
| I-1419 | 152 | | | | 1914.867 | 959 | 1916 | |
| I-1420 | 124 | | | | 1914.867 | 959 | 1916 | |
| I-1421 | 134 | | | | 1914.867 | 1939 | 1916 | |
| I-1422 | 388 | | | | 1915.826 | 959.6 | 957.3 | |
| I-1423 | 389 | | | | 1888.815 | 946.1 | 1889.7 | |
| I-1424 | 235 | | | | 1902.831 | 953 | 1902.9 | |
| I-1425 | 239 | | | | 1895.862 | 1897.4 | 1895.5 | |
| I-1426 | 203 | | | | 1854.835 | 928.7 | 1854.4 | |
| I-1427 | 33 | 30.4 | | | 1895.862 | 949.2 | 1895.4 | |
| I-1428 | 41 | 40.2 | | | 1854.835 | 928.7 | 1854.5 | |
| I-1429 | 10000 | | | | 1919.902 | 961.3 | 1919.5 | |
| I-1430 | 10000 | | | | 1878.875 | 940.7 | 1878.4 | |
| I-1431 | 44 | 14.6 | | | 1898.891 | 1900.4 | 1898.5 | |
| I-1432 | 27 | 14.5 | | | 1857.865 | 930.2 | 1857.4 | |
| I-1433 | 71 | | | | 1912.907 | 1914.4 | 1912.5 | |
| I-1434 | 83 | | | | 1871.88 | 937.2 | 1871.5 | |
| I-1435 | 90 | | | | 1932.852 | 967.9 | 965.9 | |
| I-1436 | 121 | | | | 1891.826 | 947.4 | 945.6 | |
| I-1437 | 7 | 7.1 | | | 1929.868 | 1931.5 | 1929.6 | |
| I-1438 | 5 | 7.4 | | | 1943.884 | 1945.5 | 1943.5 | |
| I-1439 | 349 | >>20 | | | 1986.905 | 1988.6 | 1986.6 | |
| I-1440 | 26 | 20.7 | | | 1928.884 | 1930.4 | 1928.5 | |
| I-1441 | 327 | | | | 1947.894 | 1949.5 | 1947.6 | |
| I-1442 | 1500 | | | | 1899.894 | 1901.5 | 1899.6 | |
| I-1443 | 24 | 9.5 | | | 1887.858 | 945.3 | 1887.8 | |
| I-1444 | 6558 | | | | 1913.91 | 1945.6 | 1913.8 | |
| I-1445 | 13 | 11.1 | | | 2044.91 | 2046.7 | 2044.8 | |
| I-1446 | 9 | 35.2 | | | 2083.877 | 2085.8 | 2083.9 | |
| I-1447 | 11 | 43.4 | | | 2063.889 | 2065.9 | 2064 | |
| I-1448 | 20 | | | | 2153.842 | 2155.8 | 2153.9 | |
| I-1449 | 16 | 29.3 | | | 2153.842 | 2155.8 | 2153.9 | |
| I-1450 | 11 | | | | 2153.842 | 2155.8 | 2154 | |
| I-1451 | 13 | 26.2 | | | 2015.889 | 2018 | 2016.1 | |
| I-1452 | 66 | | | | 1944.915 | 1946.6 | 1944.6 | |
| I-1453 | 52 | | | | 1944.915 | 1946.6 | 1944.5 | |
| I-1454 | 22 | 26.8 | | | 2012.903 | 2014.5 | 2012.6 | |
| I-1455 | 13 | 23.1 | | | 2012.903 | 2014.5 | 2012.6 | |
| I-1456 | 16 | 23.7 | | | 1992.915 | 1994.4 | 1992.6 | |
| I-1457 | 43 | >>20 | | | 2011.856 | 2013.8 | 2011.8 | |
| I-1458 | 26 | 18.1 | | | 1881.901 | | | |
| I-1459 | 5 | | | | 1939.827 | | | |
| I-1460 | 7 | | | | 1939.827 | | | |
| I-1461 | 10 | 3.7 | 1.7 | | 2026.882 | | | |
| I-1462 | 8 | 2.3 | 2.7 | 8.4 | 1991.884 | | | |
| I-1463 | 18 | | | | 2042.85 | | | |
| I-1464 | 168 | | | | 1948.847 | 1950.8 | 1948.9 | A |
| I-1465 | 10000 | | | | 1994.038 | 1996.1 | 1994 | |
| I-1466 | 10 | 2.2 | 0.7 | | 2053.915 | | | |
| I-1467 | 12 | 9.6 | | | 2066.985 | 1033.8 | 2065.1 | |
| I-1468 | 233 | | | | 1990.954 | 1990.4 | 1988.6 | |
| I-1469 | 95 | | | | 2275.135 | 2276.8 | 2274.9 | |
| I-1470 | 57 | >>20 | | | 2420.209 | | | |
| I-1471 | 34 | >>20 | | | 2120.999 | 2122.6 | 2120.7 | |
| I-1472 | 12 | >>20 | | | 2266.073 | 2267.7 | 2265.8 | |
| I-1473 | 224 | | | | 2331.198 | 1167 | 1165 | |
| I-1474 | 41 | >>20 | | | 2476.271 | 2478 | 2476.1 | |
| I-1475 | 113 | | | | 2177.062 | 2178.7 | 2176.9 | |
| I-1476 | 16 | >>20 | | | 2322.136 | 2324 | 2322.2 | |
| I-1477 | 148 | | | | 2402.235 | 2404 | 2402 | |
| I-1478 | 75 | 17.1 | | | 2547.309 | 1275 | 1273 | |
| I-1479 | 173 | | | | 2248.099 | 2250 | 2248 | |
| I-1480 | 37 | 9.3 | | | 2393.173 | 2394.9 | 2393 | |
| I-1481 | 7 | 39.7 | | | 2028.937 | 2030.7 | 2028.6 | |
| I-1482 | 7 | 18.0 | | | 2062.938 | 2064.7 | 2062.6 | |
| I-1483 | 22 | >>20 | | | 2028.9 | 2030.5 | 2028.5 | |
| I-1484 | 30 | >>20 | | | 2041.932 | 2043.7 | 2041.6 | |
| I-1485 | 7 | 25.8 | | | 1986.89 | 1988.8 | 1986.5 | |
| I-1486 | 5 | 17.9 | | | 2020.891 | 1988.4 | 1986.5 | |
| I-1487 | 7 | 21.5 | | | 1986.853 | 2022.7 | 2020.6 | |
| I-1488 | 6 | 30.3 | | | 1999.885 | 2001.6 | 1999.5 | |
| I-1489 | 17 | 9.2 | | | 2062.954 | 2066.6 | 2064.6 | |
| I-1490 | 226 | | | | 1986.923 | 1990.3 | 1987.4 | |
| I-1491 | 34 | | | | 1848.845 | 1873 | 1849 | |
| I-1492 | 5 | 7.3 | | | 1901.837 | 1903.5 | 1901.6 | |
| I-1493 | 10 | 4.9 | | | 1874.826 | 1898.5 | 1874.6 | |
| I-1494 | 5 | 14.7 | | | 1888.842 | 1912.4 | 1988.5 | |
| I-1495 | 24 | 23.9 | | | 1886.862 | 1910.4 | 1886.5 | |
| I-1496 | 51 | 9.4 | | | 1934.862 | 1958.4 | 1934.5 | |
| I-1497 | 50 | 11.4 | | | 1973.873 | 1997.4 | 1973.5 | |
| I-1498 | 48 | | | | 1925.848 | 1949.4 | 1925.4 | |
| I-1499 | 23 | 6.4 | | | 1888.842 | 1912.3 | 1888.4 | |
| I-1500 | 22 | 4.7 | | | 1915.852 | 1917.3 | 1915.4 | |
| I-1501 | 46 | >>20 | | | 2028.937 | 2030.6 | 2028.6 | |
| I-1502 | 34 | >>20 | | | 2062.938 | 2064.7 | 2062.5 | |
| I-1503 | 38 | | | | 2041.968 | 2043.6 | 2041.6 | |
| I-1504 | 46 | >>20 | | | 2014.921 | 2016.6 | 2014.5 | |
| I-1505 | 39 | >>20 | | | 2048.923 | 2050.6 | 2048.7 | |
| I-1506 | 89 | | | | 2027.953 | 2029.6 | 2027.6 | |
| I-1507 | 30 | >>20 | | | 2028.9 | 2030.4 | 2028.5 | |
| I-1508 | 87 | | | | 2041.932 | 2043.6 | 2041.6 | |
| I-1509 | 11 | 24.5 | | | 1935.821 | | | |
| I-1510 | 10 | 31.8 | | | 1908.81 | | | |
| I-1511 | 5 | >>20 | | | 1951.816 | | | |
| I-1512 | 12 | >>20 | | | 1924.805 | | | |
| I-1513 | 21 | >>20 | | | 1875.785 | | | |
| I-1514 | 27 | | | | 1848.774 | | | |
| I-1515 | 24 | >>20 | | | 1889.8 | | | |
| I-1516 | 30 | >>20 | | | 1862.79 | | | |
| I-1517 | 32 | >>20 | | | 1902.796 | | | |
| I-1518 | 23 | 24.2 | | | 1875.785 | | | |
| I-1519 | 10 | 12.8 | | | 1941.868 | | | |
| I-1520 | 11 | 17.4 | | | 1914.857 | | | |
| I-1521 | 16 | 6.0 | | | 1881.901 | 1883.4 | 1881.4 | |
| I-1522 | 6 | 5.8 | | | 1881.901 | 1883.3 | 1881.4 | |
| I-1523 | 29 | 8.0 | | | 1866.927 | 1868.5 | 1866.6 | |
| I-1524 | 17 | 8.1 | | | 1854.89 | 1856.3 | 1854.4 | |
| I-1525 | 22 | 10.8 | | | 1854.89 | 1856.4 | 1854.5 | |
| I-1526 | 84 | >>20 | | | 1855.849 | 1857.3 | 1855.4 | |
| I-1527 | 36 | 30.3 | | | 1855.849 | 1857.3 | 1855.4 | |
| I-1528 | 102 | 31.4 | | | 1840.875 | 1842.4 | 1840.5 | |
| I-1529 | 126 | >>20 | | | 1828.838 | 1830.3 | 1828.4 | |
| I-1530 | 61 | 36.9 | | | 1828.838 | 1830.4 | 1828.4 | |
| I-1531 | 84 | >>20 | | | 1882.86 | 1884.3 | 1882.4 | |
| I-1532 | 49 | >>20 | | | 1882.86 | 1884.4 | 1882.4 | |
| I-1533 | 76 | >>20 | | | 1867.885 | 1891.3 | 1867.4 | |
| I-1534 | 181 | >>20 | | | 1855.849 | 1879.3 | 1855.4 | |
| I-1535 | 72 | >>20 | | | 1855.849 | 1879.3 | 1855.4 | |
| I-1536 | 42 | 18.4 | | | 1880.942 | 1882.4 | 1880.5 | |
| I-1537 | 31 | 13.9 | | | 1868.906 | 1870.4 | 1868.5 | |
| I-1538 | 21 | 11.8 | | | 1868.906 | 1870.4 | 1868.4 | |
| I-1539 | 36 | >>20 | | | 1896.876 | 1898.4 | 1896.4 | |
| I-1540 | 17 | 42.4 | | | 1896.876 | 1898.4 | 1896.5 | |
| I-1541 | 39 | 34.7 | | | 1881.901 | 1883.4 | 1881.5 | |
| I-1542 | 64 | 49.1 | | | 1869.865 | 1871.4 | 1869.4 | |
| I-1543 | 21 | >>20 | | | 1869.865 | 1871.3 | 1869.4 | |
| I-1544 | 61 | >>20 | | | 1869.865 | 1871.3 | 1869.4 | |
| I-1545 | 26 | >>20 | | | 1869.865 | 1871.3 | 1869.4 | |
| I-1546 | 71 | 37.9 | | | 1854.89 | 1856.4 | 1854.5 | |
| I-1547 | 68 | >>20 | | | 1842.854 | 1844.4 | 1842.5 | |
| I-1548 | 28 | >>20 | | | 1842.854 | 1844.3 | 1842.4 | |
| I-1549 | 13 | 11.6 | | | 1915.885 | 1917.4 | 1915.5 | |
| I-1550 | 22 | 15.3 | | | 1900.911 | 1902.4 | 1900.6 | |
| I-1551 | 16 | 19.8 | | | 1888.875 | 1890.3 | 1888.4 | |
| I-1552 | 56 | >>20 | | | 1896.912 | | | |
| I-1553 | 133 | >>20 | | | 1881.938 | | | |
| I-1554 | 63 | >>20 | | | 1869.901 | | | |
| I-1555 | 180 | 29.3 | | | 1914.843 | | | |
| I-1556 | 385 | >>20 | | | 1858.781 | | | |
| I-1557 | 342 | >>20 | | | 1913.884 | | | |
| I-1558 | 678 | | | | 1942.875 | | | |
| I-1559 | 9683 | | | | 1901.848 | | | |
| I-1560 | 368 | | | | 1928.859 | | | |
| I-1561 | 2604 | | | | 1887.832 | | | |
| I-1562 | 5020 | | | | 1913.884 | | | |
| I-1563 | 2847 | | | | 1913.884 | | | |
| I-1564 | 122 | >>20 | | | 1901.848 | | | |
| I-1565 | 148 | >>20 | | | 1901.848 | | | |
| I-1566 | 231 | >>20 | | | 1928.859 | | | |
| I-1567 | 182 | >>20 | | | 1928.859 | | | |
| I-1568 | 7181 | | | | 1963.864 | | | |
| I-1569 | 2662 | | | | 1963.864 | | | |
| I-1570 | 1343 | | | | 1913.884 | 1915.4 | 1913.5 | |
| I-1571 | 15 | 11.7 | | | 2119.858 | 2121.8 | 2119.9 | |
| I-1572 | 20 | >>20 | | | 1973.842 | | | |
| I-1573 | 16 | >>20 | | | 1974.817 | 1976.3 | 1974.5 | |
| I-1574 | 15 | >>20 | | | 2010.784 | 2012.3 | 2010.5 | |
| I-1575 | 79 | | | | 1960.801 | 1962.3 | 1960.4 | |
| I-1576 | 224 | | | | 1938.763 | 1940.3 | 1938.4 | |
| I-1577 | 45 | | | | 1938.763 | 1940.3 | 1938.4 | |
| I-1578 | 11 | >>20 | | | 2016.865 | 1009.7 | 1007.8 | |
| I-1579 | 39 | >>20 | | | 2016.865 | 1009.7 | 1007.8 | |
| I-1580 | 1427 | | | | 2014.006 | | | |
| I-1581 | 10000 | | | | 2053.017 | | | |
| I-1582 | 1223 | | | | 1980.022 | | | |
| I-1583 | 3421 | | | | 1953.97 | | | |
| I-1584 | 2436 | | | | 1994.996 | | | |
| I-1585 | 10000 | | | | 1954.06 | | | |
| I-1586 | 10000 | | | | 2011.037 | | | |
| I-1587 | 10000 | | | | 2011.037 | | | |
| I-1588 | 10000 | | | | 1995.067 | | | |
| I-1589 | 10000 | | | | 1991.092 | | | |
| I-1590 | 7520.5 | | | | 1993.071 | | | |
| I-1591 | 3114.5 | | | | 2037.08 | | | |
| I-1592 | 2850 | | | | 2083.064 | 2085.1 | 2083.1 | |
| I-1593 | 10000 | | | | 2040.058 | 2041.9 | 2039.9 | |
| I-1594 | 10000 | | | | 2020.09 | 2021.9 | 2019.9 | |
| I-1595 | 10000 | | | | 2108.046 | 2109.8 | 2107.9 | |
| I-1596 | 10000 | | | | 1964.027 | 1965.8 | 1963.7 | |
| I-1597 | 6989 | | | | 1934.001 | 1935.7 | 1933.7 | |
| I-1598 | 10000 | | | | 1974.069 | 1975.7 | 1973.7 | |
| I-1599 | 1075 | | | | 2028.022 | 2029.8 | 2027.8 | |
| I-1600 | 4290 | | | | 2067.033 | 2068.8 | 2066.7 | |
| I-1601 | 2018 | | | | 1967.986 | 1969.7 | 1967.6 | |
| I-1602 | 362 | >>20 | | | 1994.996 | 1996.7 | 1994.7 | |
| I-1603 | 10000 | | | | 1974.069 | 1975.7 | 1973.7 | |
| I-1604 | 123 | | | | 2057.946 | 2059.8 | 2057.7 | A |
| I-1605 | 214 | | | | 2030.913 | 2032.5 | 2030.6 | A |
| I-1606 | 107 | | | | 2046.882 | 2032.5 | 2030.6 | A |
| I-1607 | 49 | 11.9 | | | 2132.915 | 2135.1 | 2133 | |
| I-1608 | 76 | 15.1 | | | 2143.979 | 2145.8 | 2143.6 | |
| I-1609 | 15 | 6.7 | | | 2098.913 | 2101.2 | 2099.7 | |
| I-1610 | 19 | 4.1 | | | 2109.977 | 2111.9 | 2109.6 | |
| I-1611 | 10 | 9.8 | | | 2111.908 | 2114.1 | 2112 | |
| I-1612 | 10 | 5.3 | 4.0 | | 2122.973 | 2124.8 | 2122.6 | |
| I-1613 | 9 | 5.2 | | | 2098.876 | 2100.9 | 2098.9 | |
| I-1614 | 15 | 6.4 | | | 2109.941 | 2111.6 | 2109.6 | |
| I-1615 | 9 | 8.0 | | | 2084.934 | 2087.3 | 2085.2 | |
| I-1616 | 13 | 4.5 | 2.8 | | 2095.998 | 2097.9 | 2095.6 | |
| I-1617 | 759 | | | | 1858.879 | | | |
| I-1618 | 10000 | | | | 1900.889 | 1902.4 | 1900.5 | |
| I-1619 | 1292 | | | | 1900.889 | 1902.4 | 1900.5 | |
| I-1620 | 2057 | | | | 1914.905 | 1916.4 | 1914.6 | |
| I-1621 | 266 | | | | 1888.853 | 1890.4 | 1888.5 | |
| I-1622 | 13 | >>20 | | | 2001.874 | | | |
| I-1623 | 30 | 27.7 | | | 2029.905 | 1016.6 | 1014.7 | |
| I-1624 | 47.5 | 42.9 | | | 2082.868 | | | |
| I-1625 | 52.5 | 29.3 | | | 1998.887 | | | |
| I-1626 | 721 | | | | 1958.931 | 980.9 | 978.9 | |
| I-1627 | 57 | >>20 | | | 1930.9 | 1932.6 | 1930.5 | |
| I-1628 | 18 | >>20 | | | 1930.9 | 1932.6 | 1930.5 | |
| I-1629 | 12 | 4.3 | 2.7 | | 2054.913 | | | |
| I-1630 | 11.5 | 5.0 | | | 2034.926 | | | |
| I-1631 | 10 | 30.1 | | | 1958.895 | 1960.5 | 1958.6 | |
| I-1632 | 10 | 6.5 | 2.6 | | 2124.879 | 2126.4 | 2124.5 | |
| I-1633 | 10 | 5.2 | | | 2040.898 | 2042.4 | 2040.5 | |
| I-1634 | 9 | 16.5 | | | 2055.872 | | | |
| I-1635 | 7 | 20.6 | | | 2035.885 | 2037.5 | 2035.6 | |
| I-1636 | 17 | >>20 | | | 1959.854 | 1961.5 | 1959.5 | |
| I-1637 | 11 | >>20 | | | 1959.854 | 1961.5 | 1959.5 | |
| I-1638 | 9 | 14.5 | | | 2125.838 | 2127.4 | 2125.5 | |
| I-1639 | 13 | 32.9 | | | 2125.838 | 2127.4 | 2125.5 | |
| I-1640 | 8 | | | | 2041.857 | 2043.4 | 2041.5 | |
| I-1641 | | 14.7 | | | 2083.904 | 2085.5 | 2083.7 | |
| I-1642 | 36 | | | | 2109.919 | 2111.5 | 2109.6 | |
| I-1643 | 822 | | | | 2021.085 | 2022.7 | 2020.7 | |
| I-1644 | 10000 | | | | 2020.09 | 2021.8 | 2019.7 | |
| I-1645 | 940 | | | | 2063.132 | 2064.8 | 2062.7 | |
| I-1646 | 640 | | | | 1994.038 | 1995.8 | 1993.6 | |
| I-1647 | 2354 | | | | 2057.012 | 2058.8 | 2056.6 | |
| I-1648 | 191 | >>20 | | | 2047.064 | 2048.8 | 2046.7 | |
| I-1649 | 2482 | | | | 2027.095 | 2028.8 | 2026.7 | |
| I-1650 | 1683 | | | | 2061.08 | 2062.9 | 2060.7 | |
| I-1651 | 3968 | | | | 2027.095 | 2028.9 | 2026.7 | |
| I-1652 | 10000 | | | | 2046.105 | 2047.9 | 2045.8 | |
| I-1653 | 903 | | | | 2078.106 | 2079.7 | 2077.7 | |
| I-1654 | 2128 | | | | 2120.19 | 2121.8 | 2119.9 | |
| I-1655 | 48 | 12.7 | | | 2087.899 | 2089.7 | 2087.8 | |
| I-1656 | 20 | 10.9 | | | 2053.915 | 2055.6 | 2053.6 | |
| I-1657 | 36 | 11.0 | | | 2053.873 | 2056 | 2054.1 | |
| I-1658 | 19 | 9.8 | | | 2019.888 | 2022.1 | 2020 | |
| I-1659 | 108 | 11.4 | | | 2046.873 | 2070.4 | 2046.6 | |
| I-1660 | 99 | | | | 2012.888 | 2036.4 | 2012.6 | |
| I-1661 | 70 | 8.3 | | | 2012.888 | 2036.4 | 2012.5 | |
| I-1662 | 69 | 12.0 | | | 2012.846 | 2036.8 | 2013 | |
| I-1663 | 67 | 8.5 | | | 1978.862 | 2002.8 | 1979.7 | |
| I-1664 | 22 | 8.0 | | | 1984.842 | 2008.4 | 1984.6 | |
| I-1665 | 17 | 9.7 | | | 1984.842 | 993.8 | 991.8 | |
| I-1666 | 15 | 6.5 | | | 1950.857 | 976.7 | 967.7 | |
| I-1667 | 13 | 5.6 | 1.3 | | 1950.857 | 976.8 | 974.8 | |
| I-1668 | 29 | 16.4 | | | 1985.862 | 994.3 | 992.3 | |
| I-1669 | 30 | 11.8 | | | 1985.862 | 1987.5 | 1985.7 | |
| I-1670 | 11 | 7.9 | | | 1951.878 | 1953.4 | 1951.6 | |
| I-1671 | 28 | 8.0 | 1.7 | | 1951.878 | 1953.5 | 1951.6 | |
| I-1672 | 40 | 7.1 | | | 2047.92 | | | |
| I-1673 | 28 | | | | 2077.93 | 2080 | 2078.1 | |
| I-1674 | 147 | 18.3 | | | 2153.962 | 2156 | 2154.1 | |
| I-1675 | 18.5 | 9.7 | | | 2103.946 | 2106 | 2104.1 | |
| I-1676 | 91 | | | | 2119.977 | 2121.9 | 2120.1 | |
| I-1677 | 17 | | | | 2107.941 | 2110 | 2108 | |
| I-1678 | 32 | 9.7 | | | 2054.913 | 1028.8 | 1026.9 | |
| I-1679 | 17.5 | | | | 2084.924 | 2086.6 | 2084.7 | |
| I-1680 | 80.5 | 12.5 | | | 2160.955 | 2162.6 | 2160.7 | |
| I-1681 | 18.5 | 5.4 | | | 2110.94 | 2112.5 | 2110.7 | |
| I-1682 | 41 | | | | 2126.971 | 2128.5 | 2126.6 | |
| I-1683 | 9 | 3.7 | | | 2114.934 | 2116.7 | 2114.9 | |
| I-1684 | 13 | 4.5 | 3.4 | | 2005.873 | 2008 | 2006.5 | |
| I-1685 | 23 | 3.5 | 1.3 | | 2061.935 | 1032.5 | 1030.3 | |
| I-1686 | 11 | 5.4 | 0.9/8.7 | | 2033.904 | 2035.9 | 2034.1 | |
| I-1687 | 42 | 18.6 | | | 2005.873 | 1004.4 | 1002.2 | |
| I-1688 | 59 | 21.5 | | | 2047.92 | 1025.5 | 1023.7 | |
| I-1689 | 25.5 | 12.5 | | | 2019.888 | 1011.5 | 1009.5 | |
| I-1690 | 11 | | | | 2028.835 | 1015.9 | 1013.9 | |
| I-1691 | 11 | 12.8 | | | 2028.835 | 1015.9 | 1013.9 | |
| I-1692 | 17 | 10.4 | | | 2084.897 | 1044 | 1042.2 | |
| I-1693 | 10 | 4.6 | | | 2056.866 | 1029.9 | 1027.7 | |
| I-1694 | 57 | 43.6 | | | 2028.835 | 2030.8 | 2028.8 | |
| I-1695 | 93 | >>20 | | | 2070.882 | 2072.9 | 2070.9 | |
| I-1696 | 32 | 35.5 | | | 2042.85 | 1022.9 | 1021 | |
| I-1697 | 179 | >>20 | | | 2044.929 | 2046.7 | 2044.9 | A |
| I-1698 | 165 | >>20 | | | 1987.944 | 2032.6 | 2030.7 | A |
| I-1699 | 533 | | | | 2019.871 | 1011.5 | 1009.4 | A |
| I-1700 | 16 | 4.8 | | | 2020.926 | 2022.6 | 2020.7 | |
| I-1701 | 25 | 24.8 | | | 2021.921 | 2023.2 | 2021.4 | |
| I-1702 | 17 | 6.9 | | | 2045.921 | 2047.5 | 2045.6 | |
| I-1703 | 24 | 6.6 | | | 2012.957 | 1007.8 | 1005.9 | |
| I-1704 | 37 | 5.3 | | | 2088.913 | 2090.3 | 2088.4 | |
| I-1705 | 9 | 2.9 | | | 2012.866 | 2014.3 | 2012.4 | |
| I-1706 | 24 | 4.8 | 2.7 | | 1999.871 | 1001.3 | 999.3 | |
| I-1707 | 19 | 6.1 | | | 2088.898 | 2090.4 | 2088.5 | |
| I-1708 | 29 | 11.9 | | | 2088.898 | 2014.4 | 2012.4 | |
| I-1709 | 14 | 6.2 | 3.9 | | 2068.929 | 1035.8 | 1033.8 | |
| I-1710 | 22 | 3.9 | 1.9 | | 1969.861 | 986.2 | 984.3 | |
| I-1711 | 232 | 33.3 | | | 2024.957 | 2026.4 | 2024.5 | A |
| I-1712 | 597 | | | | 2049.952 | 2051.4 | 2049.5 | A |
| I-1713 | 498 | >>20 | | | 2016.988 | 2018.4 | 2016.5 | A |
| I-1714 | 372 | 28.6 | | | 2092.944 | 2094.4 | 2092.5 | A |
| I-1715 | 95 | 38.4 | | | 2016.898 | 2018.4 | 2016.4 | A |
| I-1716 | 224 | 21.7 | | | 2003.902 | 1003.3 | 1001.3 | A |
| I-1717 | 249 | | | | 2092.929 | 2094.4 | 2092.5 | A |
| I-1718 | 382 | | | | 2092.929 | 1047.8 | 1045.8 | A |
| I-1719 | 187 | 27.6 | | | 2072.96 | 1037.8 | 1035.8 | A |
| I-1720 | 212 | | | | 1973.892 | | | A |
| I-1721 | 139 | >>20 | | | 1960.793 | 981 | | |
| I-1722 | 135 | >>20 | | | 1960.793 | 1961.5 | | |
| I-1723 | 62 | | | | 2113.818 | | | |
| I-1724 | 551 | 29.7 | | | 2113.818 | | | |
| I-1725 | 15 | 10.0 | | | 2034.941 | 2036.3 | 2034.4 | |
| I-1726 | 274 | >>20 | | | 2038.973 | 2040.4 | 2038.4 | A |
| I-1727 | 28 | 34.1 | | | 1959.827 | 1961.8 | | |
| I-1728 | 14 | | | | 1931.822 | 1933.5 | | |
| I-1729 | 9 | 23.0 | | | 1986.89 | 1988.5 | 1986.6 | |
| I-1730 | 38 | | | | 2040.861 | 2042.5 | 2040.6 | |
| I-1731 | 25 | 29.5 | | | 1944.879 | 1946.5 | 1944.5 | |
| I-1732 | 11 | >>20 | | | 1945.838 | 1947.6 | 1945.5 | |
| I-1733 | 15 | >>20 | | | 1945.838 | 1947.5 | 1945.5 | |
| I-1734 | 8 | | | | 2091.853 | 2093.4 | 2091.5 | |
| I-1735 | 667 | | | | 1895.892 | 1897.3 | 1895.3 | |
| I-1736 | 458 | | | | 1901.848 | 1903.3 | 1901.4 | |
| I-1737 | 518 | | | | 1909.907 | 1911.3 | 1909.3 | |
| I-1738 | 1058 | | | | 1963.879 | 1965.3 | 1963.3 | |
| I-1739 | 3655 | | | | 1909.907 | 1911.3 | 1909.3 | |
| I-1740 | 10000 | | | | 1934.874 | | | |
| I-1741 | 4393 | | | | 1973.884 | 1975.3 | 1973.4 | |
| I-1742 | 867 | | | | 1773.789 | | | |
| I-1743 | 469 | | | | 1929.891 | 1931.5 | 1929.4 | |
| I-1744 | 363 | | | | 1920.858 | 961.7 | 959.7 | |
| I-1745 | 402 | | | | 1874.837 | | | |
| I-1746 | 235 | | | | 1887.832 | 1889.4 | 1887.3 | |
| I-1747 | 187 | >>20 | | | 2011.908 | 1007.3 | 1005.3 | |
| I-1748 | 141 | 20.2 | | | 2011.908 | 1007.2 | 1005.3 | |
| I-1749 | 145 | | | | 2045.892 | 1024.2 | 1022.3 | |
| I-1750 | 104 | 23.7 | | | 2045.892 | 1024.2 | 1022.3 | |
| I-1751 | 104 | | | | 1997.892 | | | |
| I-1752 | 87 | | | | 1997.892 | 1000.3 | 998.3 | |
| I-1753 | 802 | | | | 2015.939 | 1009.3 | 1007.3 | A |
| I-1754 | 660 | | | | 2003.902 | 1003.2 | 1001.3 | A |
| I-1755 | 570 | | | | 2049.923 | | | A |
| I-1756 | 329 | | | | 2037.887 | | | A |
| I-1757 | 449 | | | | 2001.923 | | | A |
| I-1758 | 235 | | | | 1989.887 | | | A |
| I-1759 | 57 | >>20 | | | 2111.012 | 2112.6 | 2110.6 | |
| I-1760 | 32 | >>20 | | | 2098.976 | 2100.6 | 2098.5 | |
| I-1761 | 39 | >>20 | | | 2144.997 | 2146.8 | 2144.8 | |
| I-1762 | 13 | >>20 | | | 2132.96 | 2134.7 | 2132.6 | |
| I-1763 | 52 | >>20 | | | 2096.997 | 2098.8 | 2096.8 | |
| I-1764 | 23 | >>20 | | | 2084.96 | 2086.6 | 2084.5 | |
| I-1765 | 667 | | | | 2115.044 | 2116.7 | 2114.7 | A |
| I-1766 | 267 | | | | 2103.007 | 2104.8 | 2102.8 | A |
| I-1767 | 327 | | | | 2149.028 | 2150.7 | 2148.6 | A |
| I-1768 | 69 | >>20 | | | 2136.992 | 2138.7 | 2136.6 | A |
| I-1769 | 419 | | | | 2101.028 | 2012.6 | 2010.6 | A |
| I-1770 | 175 | >>20 | | | 2088.992 | | | A |
| I-1771 | 209 | | | | 2054.913 | | | |
| I-1772 | 14 | 6.8 | | | 2040.898 | 2042.3 | 2040.4 | |
| I-1773 | 32 | 8.6 | | | 2040.898 | 2042.3 | 2040.4 | |
| I-1774 | 28 | 8.9 | | | 2066.913 | 2068.3 | 2066.4 | |
| I-1775 | 15 | | | | 2052.898 | 2054.3 | 2052.4 | |
| I-1776 | 17 | 10.5 | | | 2026.882 | 2028.2 | 2026.3 | |
| I-1777 | 8 | 8.7 | | | 2012.866 | 2014.3 | 2012.4 | |
| I-1778 | 2075 | | | | 1816.82 | 909.7 | 907.7 | |
| I-1779 | | | | | 1816.82 | | | |
| I-1780 | 4192 | | | | 1830.836 | | | |
| I-1781 | 8452 | | | | 1830.836 | | | |
| I-1782 | | | | | 1943.884 | | | |
| I-1783 | 101 | >>20 | | | 1951.852 | 1953.3 | 1951.4 | |
| I-1784 | 528 | | | | 1963.889 | 1965.3 | 1963.4 | |
| I-1785 | 31 | 42.3 | | | 1978.863 | 1980.4 | 1978.5 | |
| I-1786 | 42 | >>20 | | | 1965.868 | 1967.4 | 1965.6 | |
| I-1787 | 776 | | | | 1977.905 | 1979.6 | 1977.8 | |
| I-1788 | 58 | 33.9 | | | 1987.864 | 1989.3 | 1987.4 | |
| I-1789 | 183 | | | | 1974.868 | 1976.3 | 1974.4 | |
| I-1790 | 82 | 34.4 | | | 2038.806 | 2040.5 | 2038.6 | |
| I-1791 | 182 | >>20 | | | 2025.81 | 2027.3 | 2025.4 | |
| I-1792 | 935 | | | | 2037.847 | 2039.3 | 2037.4 | |
| I-1793 | 20 | >>20 | | | 1925.848 | 1927.5 | 1925.4 | |
| I-1794 | 52 | 37.7 | | | 1925.848 | 1927.4 | 1925.4 | |
| I-1795 | 28 | 22.8 | | | 1937.884 | 1939.5 | 1937.4 | |
| I-1796 | 22 | >>20 | | | 1937.884 | 1939.5 | 1937.4 | |
| I-1797 | 10 | 22.5 | | | 2178.018 | 2179.9 | 2177.6 | |
| I-1798 | 12 | | | | 2178.018 | 2179.7 | 2177.6 | |
| I-1799 | 8 | 25.8 | | | 2181.029 | 2182.6 | 2180.6 | |
| I-1800 | 13 | 25.2 | | | 2181.029 | 2182.8 | 2180.9 | |
| I-1801 | 7 | 17.5 | | | 2193.029 | 2191.7 | 2192.6 | |
| I-1802 | 11 | 25.2 | | | 2193.029 | 2194.7 | 2192.6 | |
| I-1803 | 20 | 7.4 | | | 2177.943 | 2179.5 | 2177.6 | |
| I-1804 | 8 | 9.4 | | | 2123.971 | 2125.6 | 2123.5 | |
| I-1805 | 6 | 9.3 | | | 2123.971 | 2125.7 | 2123.7 | |
| I-1806 | 8777 | | | | 1750.774 | 1752.3 | 1750.3 | |
| I-1807 | 163 | >>20 | | | 1750.774 | 1752.4 | 1750.4 | |
| I-1808 | 90 | 14.0 | | | 1919.884 | 1921.4 | 1919.5 | A |
| I-1809 | 1947 | | | | 1752.789 | 1754.4 | 1752.4 | A |
| I-1810 | 416 | | | | 1851.821 | 1853.3 | 1851.4 | A |
| I-1811 | 156 | 32.3 | | | 1878.919 | 1880.3 | 1878.4 | |
| I-1812 | 181 | | | | 1902.796 | 1904.3 | 1902.4 | |
| I-1813 | 26 | >>20 | | | 1902.796 | 1904.3 | 1902.4 | |
| I-1814 | 189 | | | | 1901.837 | 1903.4 | 1901.5 | |
| I-1815 | 46 | >>20 | | | 1901.837 | 1903.4 | 1901.4 | |
| I-1816 | 235 | | | | 1888.78 | 1890.4 | 1888.4 | |
| I-1817 | 182 | | | | 1888.78 | 1890.4 | 1888.4 | |
| I-1818 | 236 | >>20 | | | 1887.821 | 1889.3 | 1887.4 | |
| I-1819 | 615 | | | | 1859.826 | 1861.4 | 1859.4 | |
| I-1820 | 422 | | | | 1858.867 | 1860.4 | 1858.5 | |
| I-1821 | 67 | >>20 | | | 1906.827 | 1908.3 | 1906.4 | A |
| I-1822 | 60 | >>20 | | | 1905.868 | 1907.4 | 1905.5 | A |
| I-1823 | 41 | >>20 | | | 1892.811 | 1894.4 | 1892.5 | A |
| I-1824 | 101 | >>20 | | | 1891.852 | 1893.4 | 1891.4 | A |
| I-1825 | 366 | | | | 1863.858 | 1865.4 | 1863.4 | A |
| I-1826 | 474 | | | | 1874.764 | | | |
| I-1827 | 308 | | | | 1874.764 | 1876.3 | 1874.3 | |
| I-1828 | 264 | >>20 | | | 1873.806 | 983.9 | 982.1 | |
| I-1829 | 668 | | | | 1904.811 | 1906.4 | 1904.4 | |
| I-1830 | 313 | | | | 1903.852 | 1905.4 | 1903.5 | |
| I-1831 | 1635 | | | | 1878.796 | 1880.3 | 1878.3 | A |
| I-1832 | 1110 | | | | 1877.837 | 1879.3 | 1877.4 | A |
| I-1833 | 26 | 6.9 | | | 2054.887 | 2056.9 | 2054.9 | |
| I-1834 | 35 | 18.8 | | | 2048.942 | 2050.6 | 2048.6 | |
| I-1835 | 34 | 31.9 | | | 1986.926 | 1988.5 | 1986.5 | |
| I-1836 | 24 | | | | 2016.9 | 2018.3 | 2016.4 | |
| I-1837 | 19 | 18.5 | | | 2068.929 | 2070.5 | 2068.5 | |
| I-1838 | 85 | 7.9 | | | 2138.895 | 2140.4 | 2138.5 | |
| I-1839 | 21 | 14.6 | | | 2054.913 | 2056.5 | 2054.5 | |
| I-1840 | 14 | 22.3 | | | 2000.905 | 2002.4 | 2000.5 | |
| I-1841 | 76 | >>20 | | | 1958.895 | 1960.5 | 1958.4 | |
| I-1842 | 81 | | | | 2071.979 | 2073.5 | 2071.5 | |
| I-1843 | 32 | 9.5 | | | 2051.88 | 2053.3 | 2051.4 | |
| I-1844 | 227 | | | | 2051.88 | 2055.3 | 2053.5 | |
| I-1845 | 30 | 6.3 | | | 2007.89 | 2009.3 | 2007.4 | |
| I-1846 | 38 | 29.8 | | | 2100.856 | 2102.7 | 2100.8 | |
| I-1847 | 56 | 26.2 | | | 2077.894 | 2079.7 | 2078.1 | |
| I-1848 | 42 | >>20 | | | 2068.841 | 2070.3 | 2068.4 | |
| I-1849 | 19 | 8.8 | | | 1936.815 | 970 | 1937 | |
| I-1850 | 17 | 3.8 | | | 1964.846 | 1875.3 | 1873.4 | |
| I-1851 | 25 | 3.8 | | | 1962.867 | 982.9 | 1963.7 | |
| I-1852 | 48 | 4.9 | | | 1891.83 | 947.4 | 1892.9 | |
| I-1853 | 114 | 16.3 | | | 1977.878 | 990.4 | 1978.6 | |
| I-1854 | | | | | 2074.926 | | | |
| I-1855 | 849 | | | | 2074.926 | 2076.5 | 2074.5 | |
| I-1856 | | | | | 2115.952 | | | |
| I-1857 | 4025 | | | | 2115.952 | 2117.6 | 2115.5 | |
| I-1858 | 1108 | | | | 2116.936 | 2118.4 | 2116.4 | |
| I-1859 | 1106 | | | | 2116.936 | 2118.6 | 2116.5 | |
| I-1860 | 512 | | | | 2164.903 | 1083.8 | 1081.8 | |
| I-1861 | 14 | 37.3 | | | 2108.91 | 2110.4 | 2008.3 | |
| I-1862 | 10 | 19.3 | | | 2108.91 | 2110.4 | 2108.9 | |
| I-1863 | 10 | 37.4 | | | 2149.937 | 2151.6 | 2149.5 | |
| I-1864 | 14 | >>20 | | | 2149.937 | 2151.5 | 2149.5 | |
| I-1865 | 10 | >>20 | | | 2150.921 | 2151.5 | 2149.5 | |
| I-1866 | 26 | >>20 | | | 2150.921 | 1076.4 | 1074.5 | |
| I-1867 | 7 | 16.4 | | | 2150.921 | 2152.5 | 2150.6 | |
| I-1868 | 12 | 39.6 | | | 2198.888 | 2200.5 | 2198.6 | |
| I-1869 | 12 | | | | 2198.888 | 1100.8 | 2198.6 | |
| I-1870 | 1522 | | | | 1895.892 | 1897.4 | 1895.4 | |
| I-1871 | 1765 | | | | 1895.892 | 1897.3 | 1895.4 | |
| I-1872 | 1499 | | | | 1895.892 | 1897.4 | 1895.4 | |
| I-1873 | 1479 | | | | 1895.892 | 1897.3 | 1895.4 | |
| I-1874 | 10000 | | | | 1851.923 | 1853.4 | 1851.4 | |
| I-1875 | 10000 | | | | 1851.923 | 1853.3 | 1851.4 | |
| I-1876 | 1338 | | | | 1884.887 | 1886.3 | 1884.4 | |
| I-1877 | 1524 | | | | 1884.887 | 1886.3 | 1884.3 | |
| I-1878 | 458 | | | | 1872.858 | 937.7 | 1872.4 | |
| I-1879 | 567 | | | | 1872.858 | 937.7 | 1872.4 | |
| I-1880 | 868 | | | | 1886.874 | 944.7 | 1886.4 | |
| I-1881 | 743 | | | | 1886.874 | 944.7 | 1886.4 | |
| I-1882 | 397 | | | | 1943.906 | 1945.7 | 1943.4 | |
| I-1883 | 884 | | | | 1943.906 | 1945.6 | 1943.4 | |
| I-1884 | 249 | | | | 1927.864 | 1929.4 | 1927.4 | |
| I-1885 | 255 | | | | 1927.864 | 965.3 | 1927.5 | |
| I-1886 | 10000 | | | | 1957.886 | 1959.8 | 1957.6 | |
| I-1887 | 10000 | | | | 1957.886 | 1959.6 | 1957.6 | |
| I-1888 | 10000 | | | | 1943.906 | 1945.6 | 1943.5 | |
| I-1889 | 10000 | | | | 1943.906 | 1945.6 | 1943.5 | |
| I-1890 | 31 | >>20 | | | 1957.886 | 1959.7 | 1957.4 | |
| I-1891 | 40 | >>20 | | | 1957.886 | 1959.4 | 1957.6 | |
| I-1892 | 1418 | | | | 1956.901 | 1958.6 | 1956.5 | |
| I-1893 | | | | | 1956.901 | | | |
| I-1894 | | | | | 1970.893 | | | |
| I-1895 | | | | | 1956.877 | | | |
| I-1896 | 75 | | | | 1936.932 | 1938.6 | 1936.4 | |
| I-1897 | | | | | 1922.916 | | | |
| I-1898 | 22 | 10.9 | | | 1922.916 | 962.7 | 1922.5 | |
| I-1899 | 28 | 5.1 | | | 1992.877 | 1994.8 | 1992.7 | |
| I-1900 | 136 | >>20 | | | 1992.877 | 998 | 1993 | |
| I-1901 | 34 | 4.9 | | | 1994.857 | 997.9 | 1993.7 | |
| I-1902 | 28 | 7.7 | | | 1994.857 | 998.9 | 997.1 | |
| I-1903 | 14 | 6.4 | | | 1952.81 | 977.8 | 1953.5 | |
| I-1904 | 15 | 4.2 | | >20 | 2005.873 | 1004.4 | 1002.2 | |
| I-1905 | 20 | 9.7 | | | 2066.914 | 2069.1 | 2067.6 | |
| I-1906 | 23 | 15.5 | | | 2062.919 | 2064.9 | 2063.6 | |
| I-1907 | 23 | | | | 2036.904 | 2039 | 2037.7 | |
| I-1908 | | | | | 2006.893 | | | |
| I-1909 | 29 | >>20 | | | 2109.998 | 2111.8 | 2109.7 | |
| I-1910 | 17 | 13.8 | | | 2076.915 | 2078.6 | 2076.6 | |
| I-1911 | 38 | >>20 | | | 2067.951 | 2069.9 | 2067.9 | |
| I-1912 | 13 | 11.5 | | | 2067.915 | 1035.3 | 2067.6 | |
| I-1913 | 119 | 17.5 | | | 2052.941 | 1027.8 | 2052.7 | |
| I-1914 | 52 | 6.4 | | | 2024.909 | 1016.8 | 2024.7 | |
| I-1915 | 11 | 20.2 | | | 2033.967 | 2035.8 | 2033.8 | |
| I-1916 | 8 | 9.2 | | | 2000.884 | 2002.5 | 2000.5 | |
| I-1917 | 13 | 37.7 | | | 1991.92 | 1993.7 | 1991.6 | |
| I-1918 | 5 | 4.0 | 6.5 | | 1991.884 | 997.3 | 1991.7 | |
| I-1919 | 33 | 4.7 | | | 1976.909 | 989.7 | 1976.5 | |
| I-1920 | 18 | 3.1 | 1.2 | | 1948.878 | 975.7 | 1948.5 | |
| I-1921 | 22 | | | | 1998.926 | | | |
| I-1922 | 457 | | | | 2008.017 | 2009.8 | 2007.7 | |
| I-1923 | 10000 | | | | 2022.007 | 2023.6 | 2021.6 | |
| I-1924 | 1606 | | | | 2054.973 | 2057.2 | 2055.8 | |
| I-1925 | 475 | | | | 2064.018 | 2065.8 | 2063.6 | |
| I-1926 | 417 | | | | 2051.023 | 2052.7 | 2050.6 | |
| I-1927 | 5136 | | | | 2022.007 | 2023.6 | 2021.6 | |
| I-1928 | 887 | | | | 2054.973 | 2009.8 | 2007.7 | |
| I-1929 | 74 | >>20 | | | 2064.018 | 1995.8 | 1993.6 | |
| I-1930 | 1565 | | | | 2051.023 | 2065.7 | 2063.6 | |
| I-1931 | 1558 | | | | 2037.007 | 2052.8 | 2050.6 | |
| I-1932 | 285 | | | | 2008.017 | 2038.7 | 2036.6 | |
| I-1933 | 154 | | | | 1994.001 | | | |
| I-1934 | 5 | | | | 2147.91 | 2149.5 | 2147.4 | |
| I-1935 | 9 | 7.1 | | | 2192.917 | 2194.3 | 2192.4 | |
| I-1936 | 10 | 15.7 | | | 2196.004 | 2197.6 | 2195.5 | |
| I-1937 | 9 | | | | 2208.004 | 2209.6 | 2208.3 | |
| I-1938 | 8 | 30.0 | | | 2187.941 | 2189.6 | 2187.4 | |
| I-1939 | 10 | 20.7 | | | 2138.946 | 2140.5 | 2138.4 | |
| I-1940 | 6 | 15.4 | | | 2192.993 | 2194.6 | 2192.6 | |
| I-1941 | 6 | 12.9 | | | 2110.914 | 2112.5 | 2110.3 | |
| I-1942 | 11 | 7.9 | | | 2131.904 | 2133.3 | 2131.4 | |
| I-1943 | 7 | 3.8 | | | 2111.898 | 2113.2 | 2111.3 | |
| I-1944 | 1634 | | | | 1931.83 | | | |
| I-1945 | 918 | | | | 1931.83 | | | |
| I-1946 | 874 | | | | 1931.83 | | | |
| I-1947 | 253 | | | | 1931.83 | | | |
| I-1948 | 1331 | | | | 1945.845 | | | |
| I-1949 | 96 | 28.5 | | | 1945.845 | | | |
| I-1950 | 234 | | | | 2084.854 | 1043.9 | 2084.6 | |
| I-1951 | 264 | >>20 | | | 2098.87 | 2100.4 | 2098.6 | |
| I-1952 | 923 | >>20 | | | 2083.859 | 1043.4 | 2082.8 | |
| I-1953 | 306 | >>20 | | | 2083.859 | 1043.3 | 2084.3 | |
| I-1954 | 994 | >>20 | | | 2083.859 | 2043.4 | 2041.6 | |
| I-1955 | 1201 | | | | 2083.859 | 2085.4 | 2083.3 | |
| I-1956 | 849 | | | | 2083.859 | 2085.3 | 2083.5 | |
| I-1957 | 567 | | | | 2097.875 | 2099.4 | 2097.4 | |
| I-1958 | 1536 | >>20 | | | 2097.875 | 2099.6 | 2097.5 | |
| I-1959 | 412 | >>20 | | | 2091.922 | | | |
| I-1960 | 544 | 20.4 | | | 2091.922 | | | |
| I-1961 | 2099 | >>20 | | | 2091.922 | | | |
| I-1962 | 1604 | >>20 | | | 2091.922 | | | |
| I-1963 | 326 | 25.6 | | | 2035.859 | 1019.3 | 1017.4 | |
| I-1964 | 738 | | | | 2035.859 | 2037.4 | 2034.6 | |
| I-1965 | 633 | 25.2 | | | 2035.859 | 1019.3 | 2035.6 | |
| I-1966 | 566 | | | | 2049.875 | 2051.5 | 2049.6 | |
| I-1967 | 14 | | | | 1998.926 | | | |
| I-1968 | 29 | | | | 1998.926 | | | |
| I-1969 | 49 | | | | 1998.926 | | | |
| I-1970 | 441 | | | | 1873.806 | 1875.8 | 1873.4 | |
| I-1971 | 475 | | | | 1887.821 | 1889.8 | 1887.7 | |
| I-1972 | 689 | | | | 1887.821 | 1889.9 | 1887.8 | |
| I-1973 | 797 | | | | 1901.837 | 1903.9 | 1902 | |
| I-1974 | 324 | | | | 1877.837 | 1879.8 | 1877.9 | A |
| I-1975 | 745 | | | | 1891.852 | 1891.9 | 1889.9 | A |
| I-1976 | 150 | | | | 1905.868 | 1907.9 | 1905.9 | A |
| I-1977 | 4283 | | | | 1764.789 | 1766.3 | 1764.4 | |
| I-1978 | 145 | >>20 | | | 1764.789 | 1766.3 | 1764.4 | |
| I-1979 | 10000 | | | | 1736.758 | 1738.3 | 1736.3 | |
| I-1980 | 236 | >>20 | | | 1722.742 | 1724.3 | 1722.2 | |
| I-1981 | 567 | | | | 1766.805 | 1766.3 | 1764.4 | A |
| I-1982 | 9663 | | | | 1738.774 | 1738.3 | 1736.4 | A |
| I-1983 | 186 | >>20 | | | 1724.758 | 1724.3 | 1722.3 | A |
| I-1984 | 320 | | | | 2019.888 | 1011.5 | 2020 | |
| I-1985 | 325 | | | | 2033.904 | 1018.5 | 2033.9 | |
| I-1986 | 502 | | | | 2056.866 | 1029.9 | 1028.1 | |
| I-1987 | 54 | | | | 1920.843 | 1922.4 | 1920.6 | A |
| I-1988 | 312 | | | | 1863.821 | 1865.6 | 1863.8 | |
| I-1989 | 186 | | | | 1835.79 | 1837.4 | 1835.6 | |
| I-1990 | 585 | | | | 1821.774 | 1823.4 | 1821.6 | |
| I-1991 | 397 | | | | 1865.837 | 1867.4 | 1865.5 | A |
| I-1992 | 536 | | | | 1837.806 | 1839.4 | 1837.5 | A |
| I-1993 | 728 | | | | 1823.79 | 1925.8 | | A |
| I-1994 | 10000 | | | | 1909.907 | 1911.4 | 1909.6 | |
| I-1995 | 10000 | | | | 1909.907 | 1911.4 | 1909.5 | |
| I-1996 | 10000 | | | | 1963.879 | 1965.4 | 1963.5 | |
| I-1997 | 3394 | | | | 1963.879 | 1965.2 | 1963.2 | |
| I-1998 | 732 | | | | 1929.853 | 1931.6 | 1929.8 | |
| I-1999 | 4937 | | | | 1929.853 | 966.4 | 1930 | |
| I-2000 | 6560 | | | | 1929.853 | 1932 | 1930.3 | |
| I-2001 | 4454 | | | | 1929.853 | 1931.8 | 1929.9 | |
| I-2002 | 612 | | | | 1845.785 | 1847.3 | 1845.4 | |
| I-2003 | 1015 | | | | 1845.785 | 1847.2 | 1845.2 | |
| I-2004 | 227 | | | | 2000.953 | 2002.8 | 2000.7 | |
| I-2005 | 357 | | | | 2000.953 | 2002.7 | 2000.5 | |
| I-2006 | 285 | | | | 2000.953 | 2002.8 | 2000.7 | |
| I-2007 | 10000 | | | | 1915.864 | 1917.5 | 1915.5 | |
| I-2008 | 8825 | | | | 1915.864 | 1917.4 | 1915.5 | |
| I-2009 | 1480 | | | | 1969.835 | 1971.4 | 1969.6 | |
| I-2010 | 1973 | | | | 1969.835 | 1971.4 | 1969.5 | |
| I-2011 | 10000 | | | | 1935.809 | 1937.8 | 1935.9 | |
| I-2012 | 10000 | | | | 1935.809 | 1937.7 | 1935.7 | |
| I-2013 | 661 | | | | 1935.809 | 1939.2 | 1937.3 | |
| I-2014 | 1178 | | | | 1935.809 | 969.8 | 967.4 | |
| I-2015 | 522 | | | | 1917.843 | 1920 | 1917.9 | |
| I-2016 | 703 | | | | 1917.843 | 1920 | 1918.1 | |
| I-2017 | 2054 | | | | 1916.811 | 1918.3 | 1916.4 | |
| I-2018 | 1678 | | | | 1916.811 | 1918.3 | 1916.4 | |
| I-2019 | 1449 | | | | 1915.852 | 1917.4 | 1915.4 | |
| I-2020 | 1201 | | | | 1915.852 | 1917.4 | 1915.5 | |
| I-2021 | 5380 | | | | 1920.843 | 1922.4 | 1920.4 | A |
| I-2022 | 1895 | | | | 1919.884 | 1921.4 | 1919.5 | |
| I-2023 | 32 | 7.8 | | | 1920.82 | 962.3 | 1922.2 | |
| I-2024 | 78 | 17.9 | | | 1948.851 | 976.4 | 974.2 | |
| I-2025 | 109 | | | | 1996.851 | 1000.4 | 998.3 | |
| I-2026 | 26 | 9.7 | | | 1920.82 | 962.3 | 960.3 | |
| I-2027 | 13 | 4.1 | | | 1936.815 | 970.3 | 968.1 | |
| I-2028 | 32 | 17.6 | | | 1964.846 | 984.3 | 982.2 | |
| I-2029 | 35 | 26.2 | | | 2012.846 | 1008.3 | 1006.2 | |
| I-2030 | 22 | 3.9 | | | 1936.815 | 970.3 | 1938.2 | |
| I-2031 | 11 | 4.7 | | | 1963.826 | 983.8 | 1964.2 | |
| I-2032 | 16 | 20.9 | | | 1991.857 | 997.9 | 1991.6 | |
| I-2033 | 30 | 9.5 | | | 2039.857 | 1021.9 | 1020 | |
| I-2034 | 18 | | | | 1963.826 | 983.8 | 981.9 | |
| I-2035 | 16 | 14.5 | | | 1963.826 | 1966.4 | 1964.5 | |
| I-2036 | 19 | 12.9 | | | 1963.826 | 983.8 | 981.5 | |
| I-2037 | 17 | 5.0 | | | 2039.857 | 2042.6 | 2039.7 | |
| I-2038 | 11 | 11.8 | | | 1979.821 | 991.8 | 989.7 | |
| I-2039 | 9 | 10.5 | | | 1979.821 | 991.9 | 989.7 | |
| I-2040 | 24 | 2.8 | | >20 | 2218.984 | 1111.5 | 1109.4 | |
| I-2041 | 16 | 2.3 | 1.9 | >20 | 2218.984 | 1111.4 | 1109.2 | |
| I-2042 | 9 | 10.0 | | | 1935.821 | 1937.9 | 1936 | |
| I-2043 | 8 | 2.8 | 1.0 | 15.2 | 1977.868 | 1980.1 | 1978.2 | |
| I-2044 | 9 | 2.6 | | >20 | 2011.852 | 2014.1 | 2012 | |
| I-2045 | 5 | 13.5 | | | 1951.816 | 1953.9 | 1951.9 | |
| I-2046 | 12 | 2.9 | | | 2190.979 | 2193.2 | 2191.2 | |
| I-2047 | 11 | 2.6 | 1.3 | | 2190.979 | 2193.3 | 2191 | |
| I-2048 | 91 | 28.8 | | | 2083.94 | 2085.5 | 2083.4 | |
| I-2049 | 5 | 4.5 | | | 1977.868 | 1980.2 | 1978.1 | |
| I-2050 | 9 | 4.9 | | | 1950.857 | 977.2 | 1951 | |
| I-2051 | 16 | 8.3 | | | 1964.873 | 1967 | 1965 | |
| I-2052 | 12 | 6.0 | | | 2025.868 | 2028.1 | 2025.8 | |
| I-2053 | 11 | 5.0 | | | 1949.837 | 1952 | 1949.9 | |
| I-2054 | 5 | 2.4 | | | 1977.868 | 1980.1 | 1978.1 | |
| I-2055 | 13 | 10.5 | | | 2019.915 | 2022.2 | 2020.2 | |
| I-2056 | 16 | 6.5 | | | 2033.931 | 1018.8 | 2034.3 | |
| I-2057 | 17 | 1.5 | 4.0 | >20 | 2053.915 | 1028.7 | 2054.1 | |
| I-2058 | 10 | 3.9 | | | 2039.899 | 2041.9 | 2040 | |
| I-2059 | 38 | 4.8 | | | 2012.888 | 2015.1 | 2013.1 | |
| I-2060 | 56 | 9.6 | | | 2026.904 | 2029.2 | 2027.2 | |
| I-2061 | 13 | 1.9 | 1.8 | | 2026.856 | 2029.1 | 2027.1 | |
| I-2062 | 41 | 3.0 | | | 2054.86 | 1029.4 | 1027.2 | |
| I-2063 | 56 | 3.5 | | | 2088.886 | 2091.1 | 2089.1 | |
| I-2064 | 16 | 11.8 | | | 2026.856 | 1015.2 | 2027.3 | |
| I-2065 | 144 | >>20 | | | 1991.002 | 1993.3 | 1991.1 | |
| I-2066 | 357 | | | | 1987.929 | 1990.2 | 1988.2 | |
| I-2067 | 180 | >>20 | | | 1978.929 | 1981.1 | 1979.3 | |
| I-2068 | 338 | >>20 | | | 2067.033 | 2069.3 | 2067.1 | |
| I-2069 | 256 | >>20 | | | 1957.919 | 1960.2 | 1957.9 | |
| I-2070 | 190 | >>20 | | | 1948.918 | 1951.1 | 1949.2 | |
| I-2071 | 592 | | | | 2027.964 | 2030.2 | 2018.1 | |
| I-2072 | 8256 | | | | 2027.964 | 2030.2 | 2028 | |
| I-2073 | 398 | | | | 1919.964 | 1922.2 | 1920.2 | |
| I-2074 | 789 | | | | 2026.969 | 2029.2 | 2026.9 | |
| I-2075 | 2327 | | | | 2026.969 | 2029.2 | 2027 | |
| I-2076 | 16 | 14.1 | | | 2024.916 | 2026.5 | 2024.5 | |
| I-2077 | 9 | 12.3 | 5.8 | | 2052.948 | 2054.4 | 2052.6 | |
| I-2078 | 5 | 11.7 | | | 2010.901 | 2012.4 | 2010.5 | |
| I-2079 | 8 | 15.1 | | | 2038.932 | 2040.5 | 2038.5 | |
| I-2080 | 45 | 28.8 | | | 2072.916 | | | |
| I-2081 | 13 | 11.6 | | | 2072.916 | | | |
| I-2082 | 5 | 7.7 | | | 2010.901 | 2012.5 | 2010.5 | |
| I-2083 | 5 | 3.7 | | | 2038.932 | 2040.5 | 2038.6 | |
| I-2084 | 5 | 9.2 | 9.7 | | 1996.885 | 1998.4 | 1996.5 | |
| I-2085 | 5 | 6.2 | | | 2024.916 | 2026.5 | 2024.6 | |
| I-2086 | 12 | 16.4 | | | 2058.901 | | | |
| I-2087 | 26 | 6.5 | | | 2021.906 | 2024.1 | 2022.1 | |
| I-2088 | 10 | 4.4 | | | 1991.884 | | | |
| I-2089 | 28 | 2.9 | | | 2053.915 | | | |
| I-2090 | 11 | 5.9 | | | 1934.862 | | | |
| I-2091 | 49 | 6.2 | | | 1996.893 | | | |
| I-2092 | 15 | 4.4 | | | 2025.868 | | | |
| I-2093 | 43 | 5.0 | | | 2087.899 | | | |
| I-2094 | 28 | 9.7 | | | 1968.847 | | | |
| I-2095 | 78 | 10.5 | | | 2030.878 | | | |
| I-2096 | 79 | >>20 | | | 1934.862 | | | |
| I-2097 | 23 | 22.3 | | | 1934.862 | | | |
| I-2098 | 260 | >>20 | | | 1996.893 | | | |
| I-2099 | 325 | | | | 1996.893 | 1999 | 1997.1 | |
| I-2100 | 86 | >>20 | | | 1934.862 | 1637.1 | 1935.2 | |
| I-2101 | 424 | | | | 1996.893 | 1000.1 | 1996.9 | |
| I-2102 | 273 | >>20 | | | 2077.111 | | | |
| I-2103 | 10000 | | | | 1994.001 | | | |
| I-2104 | 10000 | | | | 2008.017 | | | |
| I-2105 | 10000 | | | | 2035.028 | | | |
| I-2106 | 10000 | | | | 2044.028 | | | |
| I-2107 | 10000 | | | | 2060.989 | | | |
| I-2108 | 10000 | | | | 2045.023 | | | |
| I-2109 | 136 | >>20 | | | 2057.023 | | | |
| I-2110 | 88 | >>20 | | | 2048.059 | | | |
| I-2111 | 180 | >>20 | | | 2034.007 | | | |
| I-2112 | 501 | | | | 2021.012 | | | |
| I-2113 | 164 | | | | 2048.023 | | | |
| I-2114 | 32 | >>20 | | | 2022.853 | | | |
| I-2115 | 29 | >>20 | | | 2022.853 | | | |
| I-2116 | 19 | 33.4 | | | 2009.858 | | | |
| I-2117 | 19 | >>20 | | | 2009.858 | | | |
| I-2118 | 21 | >>20 | | | 1982.833 | | | |
| I-2119 | 29 | >>20 | | | 1982.833 | | | |
| I-2120 | 11 | 37.2 | | | 1969.838 | | | |
| I-2121 | 12 | >>20 | | | 1969.838 | | | |
| I-2122 | 12 | 34.4 | | | 1981.874 | | | |
| I-2123 | 12 | 26.9 | | | 1981.874 | | | |
| I-2124 | 29 | 38.9 | | | 1995.842 | | | |
| I-2125 | 26 | 41.2 | | | 1995.842 | | | |
| I-2126 | 68 | 29.5 | | | 2007.879 | | | |
| I-2127 | 36 | 40.8 | | | 2031.854 | | | |
| I-2128 | 29 | 27.0 | | | 2018.858 | | | |
| I-2129 | 105 | 44.0 | | | 2030.895 | | | |
| I-2130 | 4924 | | | | 2012.878 | 2014.3 | 2012.3 | |
| I-2131 | 3219 | | | | 2012.878 | 2014.4 | 2012.5 | |
| I-2132 | 10000 | | | | 1929.879 | 1931.4 | 1929.3 | |
| I-2133 | 8745 | | | | 1929.879 | 1931.5 | 1929.6 | |
| I-2134 | 10000 | | | | 1977.879 | 1979.5 | 1977.6 | |
| I-2135 | 3409 | | | | 1977.879 | 1979.5 | 1977.7 | |
| I-2136 | 5820 | | | | 1977.879 | 1979.4 | 1977.3 | |
| I-2137 | 1900 | | | | 1977.879 | 990.4 | 998.3 | |
| I-2138 | 1012 | | | | 1959.869 | 1961.9 | 1960 | |
| I-2139 | 970 | | | | 1959.869 | 1961.9 | 1959.9 | |
| I-2140 | 233 | | | | 1910.848 | 1912.9 | 1911 | |
| I-2141 | 310 | | | | 1910.848 | 1913 | 1911.2 | |
| I-2142 | 271 | >>20 | | | 1844.827 | 1846.8 | 1844.9 | |
| I-2143 | 217 | | | | 1844.827 | 1846.8 | 1845 | |
| I-2144 | 2023 | | | | 1907.863 | 1909.8 | 1907.9 | |
| I-2145 | 2068 | | | | 1907.863 | 955.5 | 1907.9 | |
| I-2146 | 248 | | | | 1924.864 | 1927 | 1925.2 | |
| I-2147 | 390 | | | | 1924.864 | 1927.1 | 1925 | |
| I-2148 | 10000 | | | | 1888.853 | 1890.8 | 1888.9 | |
| I-2149 | 7184 | | | | 1888.853 | 1890.9 | 1888.9 | |
| I-2150 | 647 | | | | 2146.903 | 2149.2 | 2147.2 | |
| I-2151 | 58 | 14.6 | | | 2146.903 | 2149.1 | 2147.1 | |
| I-2152 | 3083 | | | | 2013.822 | 2016.7 | 2014.9 | |
| I-2153 | 1484 | | | | 2007.866 | 2010.9 | 2008.8 | |
| I-2154 | 9549 | | | | 1985.881 | 1988.7 | 1986.8 | |
| I-2155 | 10000 | | | | 2075.853 | 2078.7 | 2077 | |
| I-2156 | 387 | >>20 | | | 1859.79 | 1861.7 | 1859.6 | |
| I-2157 | 141 | | | | 1873.806 | 1875.9 | 936.5 | |
| I-2158 | 213 | >>20 | | | 1887.821 | 1889.7 | 1887.8 | |
| I-2159 | 116 | >>20 | | | 1887.821 | 1889.9 | 1887.9 | |
| I-2160 | 1243 | | | | 1863.821 | | | A |
| I-2161 | 855 | >>20 | | | 1877.837 | 1879.7 | 1977.6 | A |
| I-2162 | 1163 | >>20 | | | 1891.852 | 1893.7 | 1891.8 | A |
| I-2163 | 3718 | | | | 2090.07 | 2007.1 | 2005 | |
| I-2164 | 1182 | | | | 2091.029 | 2093.3 | 2091.2 | |
| I-2165 | 441 | | | | 2020.053 | 2022.3 | 2020 | |
| I-2166 | 1586 | | | | 2063.059 | 2065.5 | 2063.3 | |
| I-2167 | 199 | >>20 | | | 2021.012 | 2023.2 | 2021 | |
| I-2168 | 212 | >>20 | | | 2064.018 | 2066.2 | 2064.1 | |
| I-2169 | 10000 | | | | 2064.018 | 2066.2 | 2064 | |
| I-2170 | 10000 | | | | 1987.987 | 1990.2 | 1988.1 | |
| I-2171 | 10000 | | | | 2002.002 | 2004.3 | 2002.6 | |
| I-2172 | 10000 | | | | 2037.007 | 2039.2 | 2037 | |
| I-2173 | 3072 | | | | 2064.018 | 2066.3 | 2064 | |
| I-2174 | 10000 | | | | 2064.018 | 2066.3 | 2064.1 | |
| I-2175 | 19 | | | | 1899.85 | 1901.8 | 1899.9 | |
| I-2176 | 87 | | | | 1933.811 | 1936.3 | 1934.4 | |
| I-2177 | 253 | | | | 1932.852 | 968.3 | 966.2 | |
| I-2178 | 42 | | | | 1917.841 | 1919.9 | 1917.9 | |
| I-2179 | 67 | | | | 1916.882 | 1918.9 | 1917.1 | |
| I-2180 | 2086 | | | | 1900.845 | 1902.9 | 1900.8 | |
| I-2181 | 2877 | | | | 1899.887 | 1901.9 | 1900 | |
| I-2182 | 5 | 11.1 | | | 1928.761 | 1931.7 | 1930.2 | |
| I-2183 | 5 | 5.0 | | | 1927.802 | 1930.8 | 1928.6 | |
| I-2184 | 358 | | | | 2108.835 | 1054.6 | 1052.5 | |
| I-2185 | 42 | 6.1 | | | 2108.835 | 1054.7 | 1052.4 | |
| I-2186 | 459 | | | | 2186.952 | 1095.2 | 2186.9 | |
| I-2187 | 28 | 10.8 | | | 2186.952 | 1095.2 | 2187 | |
| I-2188 | 11 | 7.6 | | | 2005.899 | 2008 | 2005.9 | |
| I-2189 | 83 | 33.4 | | | 2004.941 | 2092.5 | 2090.4 | |
| I-2190 | 28 | 33.4 | | | 1978.889 | 991.1 | 1979 | |
| I-2191 | 16 | 29.5 | | | 2033.931 | 2036.1 | 2034.1 | |
| I-2192 | 22 | 16.1 | | | 2047.946 | 1025.7 | 2048.3 | |
| I-2193 | 164 | 39.9 | | | 2032.972 | 2035.2 | 2033.2 | |
| I-2194 | 91 | 8.8 | | | 2004.941 | 2007.1 | 2005.1 | |
| I-2195 | 62 | 21.0 | | | 2006.92 | 2009.1 | 2007.1 | |
| I-2196 | 41 | 39.3 | | | 2061.962 | 1032.7 | 2062 | |
| I-2197 | 2448 | | | | 1887.832 | 1889.8 | 1887.9 | |
| I-2198 | 1465 | | | | 1887.832 | 1889.8 | 1888.1 | |
| I-2199 | 927 | | | | 1915.864 | 1917.8 | 1915.8 | |
| I-2200 | 8401 | | | | 1844.863 | 1846.8 | 1844.9 | |
| I-2201 | 10000 | | | | 1859.801 | 1861.7 | 1859.8 | |
| I-2202 | 11 | 5.0 | | | 1968.848 | 986 | 1968.9 | |
| I-2203 | 9 | 2.9 | | | 2037.879 | 2040.3 | 2038.4 | |
| I-2204 | 10 | 3.3 | | | 2037.879 | 2040.3 | 2038.4 | |
| I-2205 | 18 | 3.2 | | | 1996.852 | 1000.3 | 1997.4 | |
| I-2206 | 7 | 7.1 | | | 2009.874 | 1006.5 | 2010 | |
| I-2207 | 16 | 3.2 | | | 1966.869 | 1968.8 | 1966.9 | |
| I-2208 | 27 | 5.7 | | | 2059.871 | 2061.9 | 2060 | |
| I-2209 | 50 | 18.6 | | | 2018.845 | 1011.1 | 2018.8 | |
| I-2210 | 128 | 12.4 | | | 2046.849 | 1025.2 | 1023.3 | |
| I-2211 | 23 | 12.9 | | | 2059.871 | 1031.6 | 2060 | |
| I-2212 | 60 | 6.6 | | | 2016.865 | 1010 | 2017 | |
| I-2213 | 5252 | | | | 1889.848 | 1892.8 | 1890.9 | |
| I-2214 | 1857 | | | | 2005.987 | 2008.1 | 2006.3 | |
| I-2215 | 1542 | | | | 1969.987 | 1971.9 | 1970 | |
| I-2216 | 7 | 3.4 | | | 2003.834 | 2006.9 | 2005.2 | |
| I-2217 | 6 | 2.1 | | | 1989.818 | 997 | 995.1 | |
| I-2218 | 34 | 5.1 | | | 2024.838 | 1014.5 | 1012.8 | |
| I-2219 | 21 | 2.7 | | | 2065.865 | 1035 | 2067.1 | |
| I-2220 | 12 | 16.3 | | | 1969.873 | 1972.4 | 1969.8 | |
| I-2221 | 11 | 5.0 | | | 1955.857 | 1958.4 | 1955.8 | |
| I-2222 | 84 | 11.7 | | | 1990.877 | 1993.4 | 1992.3 | |
| I-2223 | 50 | 9.0 | | | 2031.904 | 1017.8 | 1015.7 | |
| I-2224 | 14 | 14.2 | | | 1969.873 | 1972.4 | 1969.7 | |
| I-2225 | 13 | 7.8 | | | 1955.857 | 979.8 | 977.5 | |
| I-2226 | 97 | 10.6 | | | 1990.877 | 997.3 | 995.2 | |
| I-2227 | 47 | 6.3 | | | 2031.904 | 1017.8 | 1015.7 | |
| I-2228 | 2142 | | | | 1722.717 | 1724.9 | 1722.9 | |
| I-2229 | 6 | | | | 2067.922 | 2070.1 | 2068.1 | |
| I-2230 | 8 | | | | 2067.922 | 2070.1 | 2068.3 | |
| I-2231 | 5187 | | | | 1850.812 | 1852.9 | 1851.2 | |
| I-2232 | 10000 | | | | 1850.812 | 1853.1 | 1851.3 | |
| I-2233 | 14 | >>20 | | | 2057.963 | 2060.3 | 2058 | |
| I-2234 | 22 | >>20 | | | 2043.947 | 2046.2 | 2044 | |
| I-2235 | 40 | >>20 | | | 2069.963 | 2072.4 | 2070 | |
| I-2236 | 23 | 15.3 | | | 2130.908 | 2133.1 | 2130.9 | |
| I-2237 | 5 | 24.3 | | | 2049.9 | 2052.1 | 2050.1 | |
| I-2238 | 11 | | | | 2147.974 | 2150.3 | 2148.2 | |
| I-2239 | 10 | 31.9 | | | 2071.942 | 2074.2 | 2071.9 | |
| I-2240 | 5 | >>20 | | | 2084.974 | 2087.3 | 2085.3 | |
| I-2241 | 18 | 17.7 | | | 2152.874 | 2155.2 | 2153 | |
| I-2242 | 13 | 21.4 | | | 2138.858 | 2141 | 2139.1 | |
| I-2243 | 15 | 25.2 | | | 2071.979 | 2074.2 | 2072 | |
| I-2244 | 16 | 27.4 | | | 2057.963 | 2060.2 | 2058 | |
| I-2245 | 26 | >>20 | | | 2083.979 | 2086.2 | 2084 | |
| I-2246 | 27 | 12.9 | | | 2144.924 | 2147 | 2145 | |
| I-2247 | 8 | 5.9 | | | 2063.916 | 2066 | 2064.1 | |
| I-2248 | 8 | 21.5 | | | 2161.989 | 2164.2 | 2162.1 | |
| I-2249 | 14 | 42.2 | | | 2085.958 | 2088.2 | 2086.1 | |
| I-2250 | 12 | 36.2 | | | 2098.99 | 2101.2 | 2099.1 | |
| I-2251 | 15 | 6.4 | | | 2166.889 | 2168.9 | 2167.1 | |
| I-2252 | 31 | 17.5 | | | 2152.874 | 2154.9 | 2153 | |
| I-2253 | 189 | | | | 1996.828 | 1000.6 | 998.3 | |
| I-2254 | 5792 | | | | 2011.943 | 2013.8 | 2011.9 | |
| I-2255 | 7647 | | | | 1984.002 | 1985.9 | 1983.9 | |
| I-2256 | 8412 | | | | 2073.974 | 2075.9 | 2073.9 | |
| I-2257 | 15 | 2.9 | | | 1934.862 | | | |
| I-2258 | 272 | | | | 1950.857 | | | |
| I-2259 | 30 | 4.3 | | | 1968.847 | | | |
| I-2260 | 21 | 3.1 | | | 1952.853 | | | |
| I-2261 | 34 | 6.4 | | | 1946.896 | | | |
| I-2262 | 18 | 3.7 | | | 1952.853 | | | |
| I-2263 | 47 | 4.3 | | | 1946.896 | | | |
| I-2264 | 45 | 25.5 | | | 2084.888 | 2087.1 | 2085 | |
| I-2265 | 67 | >>20 | | | 2088.919 | 2091.2 | 2089 | A |
| I-2266 | 266 | | | | 2048.833 | 2051.1 | 2048.9 | |
| I-2267 | 499 | | | | 2052.865 | 2055.1 | 2052.9 | A |
| I-2268 | 13 | 3.1 | | 4.3 | 2333.054 | | | |
| I-2269 | 20 | 2.3 | | 3.9 | 2475.128 | | | |
| I-2270 | 40 | | | | 2617.202 | | | |
| I-2271 | 13 | 2.3 | | 9.0 | 2204.995 | | | |
| I-2272 | 43 | 3.0 | | | 2361.085 | | | |
| I-2273 | 107 | 6.2 | | | 2517.175 | | | |
| I-2274 | 10 | 2.0 | | 6.2 | 2090.952 | | | |
| I-2275 | 117 | 3.5 | | | 2317.12 | | | |
| I-2276 | 157.5 | 4.0 | 3.9 | >20 | 2317.12 | | | |
| I-2277 | 114 | 2.3 | | 9.0 | 2275.073 | | | |
| I-2278 | 119.5 | 2.8 | | >20 | 2275.073 | | | |
| I-2279 | 7233 | >>20 | | | 2543.288 | | | |
| I-2280 | 10000 | >>20 | >>20 | >20 | 2543.288 | | | |
| I-2281 | 138 | 4.3 | | | 2417.148 | | | |
| I-2282 | 155.5 | 3.7 | | | 2417.148 | | | |
| I-2283 | 2862 | 4.5 | | | 2601.269 | | | |
| I-2284 | 2683 | 12.9 | | | 2601.269 | | | |
| I-2285 | 94 | | | | 2017.738 | 1011.1 | 1008.5 | |
| I-2286 | 88 | | | | 2040.777 | 1022.9 | 2043.1 | |
| I-2287 | 7 | 7.1 | | | 2031.813 | 2034.8 | 2032.5 | |
| I-2288 | 5 | 6.7 | | | 2017.797 | 2020.8 | 2018.8 | |
| I-2289 | 8 | 9.0 | | | 2052.817 | 2055.8 | 2053.8 | |
| I-2290 | 14 | 7.9 | | | 2093.844 | 2096.8 | 2094.9 | |
| I-2291 | 5 | 4.9 | | | 1963.943 | 1965.8 | 1963.9 | |
| I-2292 | 9 | 2.7 | | | 1949.927 | 1951.9 | 1950 | |
| I-2293 | 15 | 5.7 | | | 1984.947 | 994 | 992.1 | |
| I-2294 | 16 | 4.6 | | | 2025.974 | 2027.9 | 2025.9 | |
| I-2295 | 5 | 3.3 | | | 1975.943 | 1977.9 | 1976 | |
| I-2296 | 6 | 5.1 | | | 1961.927 | 1963.9 | 1961.9 | |
| I-2297 | 68 | 5.5 | | | 1996.947 | 1998.9 | 1997 | |
| I-2298 | 8 | 4.6 | | | 2037.974 | 2039.9 | 2038 | |
| I-2299 | 7 | 5.2 | | | 2166.999 | 2169.1 | 2167.2 | |
| I-2300 | 6 | 1.2 | | >20 | 2166.999 | 2169.1 | 2167.3 | |
| I-2301 | 5 | >>20 | | | 2076.973 | 2079.2 | 2077.3 | |
| I-2302 | 5 | 2.5 | | | 2005.899 | 2007.9 | 2005.8 | |
| I-2303 | 5 | 1.2 | | | 2005.899 | 2008 | 2006 | |
| I-2304 | 511 | | | | 2020.909 | | | |
| I-2305 | 65 | >>20 | | | 2020.909 | | | |
| I-2306 | 45 | >>20 | | | 1897.769 | 1899.3 | 1897.5 | |
| I-2307 | 16 | 8.9 | | | 2013.822 | 2016.8 | 2015.1 | |
| I-2308 | 8 | 6.0 | | | 1999.807 | 1002 | 1000.2 | |
| I-2309 | 17 | 13.7 | | | 1985.927 | 1988 | 1986.1 | |
| I-2310 | 18 | 8.9 | | | 1971.912 | 1973.9 | 1971.5 | |
| I-2311 | 5 | 5.2 | | | 1999.943 | 2001.9 | 2000.1 | |
| I-2312 | 5 | 5.2 | | | 1985.927 | 1987.9 | 1985.9 | |
| I-2313 | 22 | 24.3 | | | 1999.943 | 2001.9 | 2000.1 | |
| I-2314 | 48 | >>20 | | | 1985.927 | 1988 | 1986.1 | |
| I-2315 | 5 | 1.2 | 1.5 | >20 | 2123.957 | 1063.3 | 1061.3 | |
| I-2316 | 11 | 1.6 | | >20 | 2204.976 | 2206.3 | 2204.4 | |
| I-2317 | 12 | 18.8 | | | 2205.051 | 2206.6 | 2204.6 | |
| I-2318 | 5 | 1.8 | | >20 | 2136.952 | 2138.3 | 2136.4 | |
| I-2319 | 5 | 1.0 | 1.7 | >20 | 2164.983 | 1083.8 | 1081.8 | |
| I-2320 | 29 | 2.7 | | >20 | 2155.962 | 1079.3 | 1076.9 | |
| I-2321 | 5 | 1.7 | | | 2214.966 | 1108.8 | 1106.8 | |
| I-2322 | 7 | 1.8 | | >20 | 2169.998 | 2171.3 | 2169.4 | |
| I-2323 | 6 | 17.7 | | | 2208.062 | 2209.5 | 2207.5 | |
| I-2324 | 83 | 14.8 | | | 1978.862 | | | |
| I-2325 | 1353 | | | | 2046.924 | | | |
| I-2326 | 185 | | | | 2017.838 | | | |
| I-2327 | 376 | | | | 2040.877 | | | |
| I-2328 | 170 | >>20 | | | 2166.929 | 2169.1 | 2167.1 | A |
| I-2329 | 3795 | | | | 2039.891 | 2042 | 2040.1 | |
| I-2330 | 3856 | | | | 2025.875 | 2027.9 | 2025.8 | |
| I-2331 | 10000 | | | | 1915.864 | 1917.4 | 1915.3 | |
| I-2332 | 10000 | | | | 1915.864 | 1917.3 | 1915.3 | |
| I-2333 | 10000 | | | | 1900.864 | 1902.3 | 1900.3 | |
| I-2334 | 656 | | | | 1831.831 | 917.3 | 1831.3 | |
| I-2335 | 7 | 37.0 | | | 1991.859 | 1993.4 | 1991.3 | |
| I-2336 | 19 | 14.4 | | | 1978.863 | 1980.4 | 1978.3 | |
| I-2337 | 311 | | | | 1897.853 | 1899.8 | 1897.7 | |
| I-2338 | 63 | >>20 | | | 1915.864 | 1917.5 | 1915.5 | |
| I-2339 | 2816 | | | | 1915.864 | 1917.4 | 1915.5 | |
| I-2340 | 5 | >>20 | | | 2110.064 | 2112 | 2109.9 | |
| I-2341 | 42 | >>20 | | | 2145.062 | 2146.8 | 2144.8 | |
| I-2342 | 2725 | | | | 2109.08 | 2110.9 | 2108.8 | |
| I-2343 | 10000 | | | | 2109.08 | 2110.8 | 2108.8 | |
| I-2344 | 586 | | | | 2020.053 | 2021.8 | 2019.6 | |
| I-2345 | 1267 | | | | 2020.053 | 2021.7 | 2019.7 | |
| I-2346 | 422 | | | | 2047.101 | 2048.9 | 2046.9 | |
| I-2347 | 5632 | | | | 2047.101 | 1025 | 2047.4 | |
| I-2348 | 179 | | | | 2056.064 | 2057.7 | 2055.7 | |
| I-2349 | 1155 | | | | 2056.064 | 2057.6 | 2055.7 | |
| I-2350 | 63 | >>20 | | | 2047.101 | 2048.8 | 2046.8 | |
| I-2351 | 187 | | | | 2056.064 | 2057.9 | 2056 | |
| I-2352 | 211 | | | | 1990.043 | 1991.8 | 1989.7 | |
| I-2353 | 2757 | | | | 2034.069 | 2035.8 | 2033.8 | |
| I-2354 | 100 | >>20 | | | 1977.97 | 1979.4 | 1977.3 | |
| I-2355 | 417 | | | | 1977.97 | 1979.3 | 1977.3 | |
| I-2356 | 5274 | | | | 1943.884 | 1945.7 | 1943.8 | |
| I-2357 | 6989 | >>20 | | | 1943.884 | 1945.7 | 1943.8 | |
| I-2358 | 463 | 52.2 | | | 1943.884 | 1945.7 | 1943.8 | |
| I-2359 | 424 | >>20 | | | 1929.868 | 1931.7 | 1929.8 | |
| I-2360 | 2443 | >>20 | | | 1929.868 | 1931.7 | 1929.8 | |
| I-2361 | 349 | 36.7 | | | 1929.868 | 1931.7 | 1929.8 | |
| I-2362 | 66 | | | | 1955.822 | 1957.7 | 1955.9 | |
| I-2363 | 44 | | | | 1997.869 | 1999.7 | 1998.6 | |
| I-2364 | 116 | | | | 1997.869 | 1999.7 | 1998.2 | |
| I-2365 | 3442 | | | | 1957.899 | 980.5 | 1958.4 | |
| I-2366 | 1737 | | | | 1943.884 | 973.4 | 1943.7 | |
| I-2367 | 7 | 6.2 | | | 2072.932 | 1038 | 1036 | |
| I-2368 | 5 | 5.0 | | | 2100.963 | 2102.8 | 2100.9 | |
| I-2369 | 14 | 9.5 | | | 2086.947 | 1045 | 1043 | |
| I-2370 | 12 | | | | 2031.905 | 2033.4 | 2031.5 | |
| I-2371 | 5 | 5.0 | | | 2031.905 | 2033.7 | 2031.7 | |
| I-2372 | 5 | 2.6 | 2.1 | 7.0 | 2059.937 | 2061.6 | 2059.8 | |
| I-2373 | 5 | 4.0 | | | 2017.89 | 2019.6 | 2017.7 | |
| I-2374 | 7 | 3.4 | 2.6 | | 2045.921 | 1024.5 | 1022.5 | |
| I-2375 | 5 | 13.5 | | | 2009.942 | 2011.7 | 2009.6 | |
| I-2376 | 352 | | | | 2011.871 | 2013.4 | 2011.6 | A |
| I-2377 | 978 | | | | 2108.924 | 2110.5 | | A |
| I-2378 | 31 | 4.8 | 1.0 | | 2238.036 | 1120.4 | 1118.5 | |
| I-2379 | 245.5 | 5.0 | | | 2266.067 | 1134.5 | 1132.6 | |
| I-2380 | 329.5 | 2.7 | 1.5 | >20 | 2280.083 | 1141.5 | 1139.5 | |
| I-2381 | 1471 | 2.1 | 1.1 | >20 | 2314.067 | 1158.5 | 1156.5 | |
| I-2382 | 37 | 4.0 | 7.6 | | 2295.057 | 2296.8 | 2294.9 | |
| I-2383 | 77 | 4.2 | 0.8 | | 2268.046 | 1135.4 | 1133.5 | |
| I-2384 | 5 | 4.6 | 1.1 | | 2254.031 | 2255.7 | 2253.9 | |
| I-2385 | 563.5 | 4.0 | 1.8 | | 2280.083 | 1141.5 | 1139.4 | |
| I-2386 | 75.5 | 2.8 | 0.7 | | 2252.052 | 1127.6 | 1125.6 | |
| I-2387 | 120 | 7.1 | 1.5 | | 2278.067 | 1140.6 | 1138.4 | |
| I-2388 | 133 | 5.7 | 1.2 | | 2264.052 | 1133.5 | 1131.4 | |
| I-2389 | 72 | | | | 2250.036 | 1126.4 | 1124.4 | |
| I-2390 | 22 | 9.1 | 1.4 | | 2281.042 | 2282.8 | 2280.9 | |
| I-2391 | 110 | 8.2 | 0.7 | | 2280.083 | 1141.5 | 1139.5 | |
| I-2392 | 461.5 | 8.6 | | | 2330.062 | 2331.9 | 2330.1 | |
| I-2393 | 61 | >>20 | 5.6 | | 2323.1 | 2325.1 | 2323.1 | |
| I-2394 | 534.5 | 2.2 | 0.7 | >20 | 2353.078 | 1178.1 | 1176.1 | |
| I-2395 | 28 | 5.5 | 1.2 | | 2238.036 | 2239.7 | 2237.8 | |
| I-2396 | 187 | 8.3 | 1.5 | | 2280.083 | 1141.5 | 1139.5 | |
| I-2397 | 53 | 7.8 | | | 2268.046 | 1135.5 | 1133.5 | |
| I-2398 | 28 | 3.6 | 1.3 | | 2295.057 | 2296.8 | 2294.9 | |
| I-2399 | 17 | 2.8 | 2.2 | | 2195.989 | 2197.7 | 2195.8 | |
| I-2400 | 142.5 | 2.5 | 0.8 | | 2272.02 | 1137.5 | 1135.5 | |
| I-2401 | 37 | 4.4 | 0.8 | | 2224.02 | 1113.5 | 1111.5 | |
| I-2402 | 16 | >>20 | | | 1949.812 | 1951.4 | 1949.2 | |
| I-2403 | 12 | >>20 | | | 1972.851 | 987.9 | 985.8 | |
| I-2404 | 781 | | | | 2025.887 | 2027.6 | 2025.6 | A |
| I-2405 | 568 | | | | 2122.94 | 2124.8 | 2123 | A |
| I-2406 | 242 | | | | 2180.945 | 2182.7 | 2180.8 | A |
| I-2407 | 138 | >>20 | | | 1957.922 | 1959.6 | 1957.4 | |
| I-2408 | 10000 | | | | 1914.905 | 1916.3 | 1914.3 | |
| I-2409 | 397 | 50.0 | | | 1902.868 | 1904.3 | 1902.3 | |
| I-2410 | 304 | >>20 | | | 1938.88 | 1940.3 | 1938.3 | |
| I-2411 | 140 | | | | 1858.842 | 1860.7 | 1858.9 | |
| I-2412 | 267 | | | | 1934.874 | 1936.7 | 1934.8 | |
| I-2413 | 133 | | >>20 | | 1943.906 | 1945.6 | 1943.3 | |
| I-2414 | 7 | >>20 | | | 1924.864 | 1926.8 | 1924.8 | |
| I-2415 | 147 | >>20 | | | 1901.848 | 1903.3 | 1901.2 | |
| I-2416 | 133 | >>20 | >>20 | | 1888.853 | 1890.1 | 1888.2 | |
| I-2417 | 158 | 21.6 | | | 1927.814 | 1930 | 1927.8 | |
| I-2418 | 10000 | | | | 1947.996 | 1949.7 | 1947.3 | |
| I-2419 | 203 | >>20 | | | 1978.006 | 1979.6 | 1977.3 | |
| I-2420 | 2125 | | | | 1991.002 | 1992.6 | 1990.3 | |
| I-2421 | 145 | >>20 | | | 2005.017 | 2006.7 | 2004.6 | |
| I-2422 | 3360 | | | | 1963.991 | 1965.6 | 1963.3 | |
| I-2423 | 10000 | | | | 1978.006 | 1979.6 | 1977.4 | |
| I-2424 | 10000 | | | | 1962.011 | 1963.6 | 1961.4 | |
| I-2425 | 10000 | | | | 2061.043 | 2062.4 | 2060.4 | |
| I-2426 | 46 | >>20 | >>20 | | 2103.09 | 2104.7 | 2102.6 | |
| I-2427 | 757 | | | | 2061.08 | 2062.5 | 2060.6 | |
| I-2428 | 401 | | | | 2103.127 | 2104.5 | 2102.5 | |
| I-2429 | 10 | >>20 | | | 2048.085 | 2049.4 | 2047.5 | |
| I-2430 | 32 | 4.5 | | | 2095.962 | 2097.9 | 2095.9 | |
| I-2431 | 33 | 7.0 | | | 2095.962 | 1049.5 | 1047.2 | |
| I-2432 | 60 | | | | 2235.036 | 2236.4 | 2234.5 | |
| I-2433 | 10000 | | | | 1959.848 | 981.6. | 1960.1 | |
| I-2434 | 10000 | | | | 1978.965 | 990.8. | 1978.2 | |
| I-2435 | 10000 | | | | 1935.996 | 1937.1 | 1935.1 | |
| I-2436 | 10000 | | | | 1894.933 | 948.8. | 946.7. | |
| I-2437 | 10000 | | | | 1937.939 | 1939.2 | 1937.2 | |
| I-2438 | 1762 | | | | 1905.912 | 1907.3 | 1905.1 | |
| I-2439 | 2762 | | | | 1932.923 | 1934.4 | 1932.2 | |
| I-2440 | 360 | | | | 1945.919 | 1947.4 | 1945.2 | |
| I-2441 | 10000 | | | | 1924.955 | 1926.4 | 1924.2 | |
| I-2442 | 282 | | | | 1930.944 | 1932.3 | 1930.2 | |
| I-2443 | 6674 | | | | 1908.948 | 855.8. | 853.5. | |
| I-2444 | 121 | | | | 2235.036 | 1118.8 | 1116.7 | |
| I-2445 | 5 | 17.1 | 9.5 | | 2022.901 | 2024.1 | 2022.2 | |
| I-2446 | 93 | >>20 | | | 2053.021 | 2054.3 | 2052.4 | |
| I-2447 | 3249 | | | | 1950.959 | 1958.2 | 1956.3 | |
| I-2448 | 84 | >>20 | | | 2020.053 | 2027.5 | 2025.4 | |
| I-2449 | 10000 | | | | 1950.995 | 1958.6 | 1956.3 | |
| I-2450 | 63 | >>20 | | | 2020.09 | 2027.4 | 2025.4 | |
| I-2451 | 4861 | | | | 1987.958 | 1989.3 | 1987.4 | A |
| I-2452 | 7201 | | | | 2057.052 | 2058.6 | 2054.4 | A |
| I-2453 | 10000 | | | | 2024.085 | 2031.6 | 2029.4 | A |
| I-2454 | 10000 | | | | 1955.027 | 1962.5 | 1960.2 | A |
| I-2455 | 10000 | | | | 2024.121 | 2031.4 | 2029.4 | A |
| I-2456 | 49 | 8.1 | | | 2067.93 | 2068.9 | 2067.1 | |
| I-2457 | 52 | 20.8 | | | 2067.93 | 2090.8 | 2067 | |
| I-2458 | 33 | 5.9 | | | 2067.93 | 2068.9 | 2067 | |
| I-2459 | 56 | 15.1 | | | 2067.93 | 2090.8 | 2067.1 | |
| I-2460 | 82 | 12.8 | | | 2047.958 | 2048.9 | 2047 | |
| I-2461 | 75 | 25.4 | | | 2047.958 | 2070.8 | 2047 | |
| I-2462 | 40 | 4.7 | | | 2061.974 | 2063.1 | 2061.2 | |
| I-2463 | 47 | 6.5 | | | 2061.974 | 1032.1 | 2061.1 | |
| I-2464 | 79 | 16.5 | | | 2061.974 | 2063.1 | 2061.2 | |
| I-2465 | 164 | >>20 | | | 2061.974 | 2084.8 | 2061 | |
| I-2466 | 15 | | | | 2152.983 | 2153.9 | 2152.1 | |
| I-2467 | 10 | 2.5 | 1.4 | | 2125.95 | 2127 | 2125 | |
| I-2468 | 38 | 6.2 | 6.4 | >20 | 2138.968 | 2140 | 2138.1 | |
| I-2469 | 7 | 2.3 | 0.6 | 5.6 | 2076.937 | 2078 | 2076.1 | |
| I-2470 | 24 | | | | 2152.983 | 2153.9 | 2152 | |
| I-2471 | 14 | 2.1 | | | 2125.95 | 2126.9 | 2125.1 | |
| I-2472 | 13 | 1.8 | | | 2124.952 | 2125.8 | 2123.9 | |
| I-2473 | 7 | | | | 2076.937 | 2077.9 | 2076 | |
| I-2474 | 19 | | | | 2165.982 | 2167 | 2165.1 | |
| I-2475 | 28 | | | | 2164.983 | 2187.8 | 2164 | |
| I-2476 | 7 | | | | 2116.968 | 2118 | 2116.1 | |
| I-2477 | 165 | >>20 | | | 1915.9 | 1917.3 | 1915.1 | |
| I-2478 | 310 | >>20 | | | 1950.868 | 976.6. | 974.7. | |
| I-2479 | 627 | | | | 1900.889 | 951.7. | 950.18 | |
| I-2480 | 475 | | | | 1886.874 | 944.6. | 942.6. | |
| I-2481 | 754 | | | | 1973.884 | 988.2. | 986.19 | |
| I-2482 | 5 | | | | 2036.916 | 2038.1 | 2036.1 | |
| I-2483 | 5 | | | | 2078.963 | 2080.1 | 2078.2 | |
| I-2484 | 6291 | >>20 | | | 2104.941 | 2105.9 | 2104.2 | |
| I-2485 | 4754 | >>20 | | | 2104.941 | 2127.8 | 2104.1 | |
| I-2486 | 34 | 3.7 | | | 2087.876 | 2089.3 | 2087.6 | |
| I-2487 | 36 | 4.2 | | | 2087.876 | 1045.3 | 1043.4 | |
| I-2488 | 26 | 3.6 | | | 2071.905 | 2072.9 | 2071.2 | |
| I-2489 | 29 | 7.4 | | | 2071.905 | 1037.1 | 1035.1 | |
| I-2490 | 39 | 6.4 | | | 2087.876 | 2089.4 | 2087.5 | |
| I-2491 | 49 | 6.1 | | | 2087.876 | 1045.3 | 1043.4 | |
| I-2492 | 174 | >>20 | | | 1913.848 | 1917.3 | 1915.1 | |
| I-2493 | 267 | >>20 | | | 1941.879 | 976.6. | 974.7. | |
| I-2494 | 102 | >>20 | | | 1929.879 | 951.7. | 950.19 | |
| I-2495 | 95 | >>20 | | | 1915.864 | 944.6. | 942.6. | |
| I-2496 | 106 | >>20 | | | 1929.879 | 988.2. | 986.19 | |
| I-2497 | 105 | >>20 | | | 1915.864 | 1916.9 | 1914.9 | |
| I-2498 | 449 | | | | 2033.996 | 2035.1 | 2033 | |
| I-2499 | 10000 | | | | 2046.032 | 2047.1 | 2045.1 | |
| I-2500 | 10000 | | | | 2074.064 | 2075.2 | 2073.1 | |
| I-2501 | 154 | >>20 | | | 2089.038 | 2090.2 | 2088.1 | |
| I-2502 | 214 | >>20 | | | 2075.023 | 2076.1 | 2074 | |
| I-2503 | 1306 | | | | 2033.996 | 2035.1 | 2033.1 | |
| I-2504 | 210 | >>20 | | | 2061.007 | 2062 | 2060.1 | |
| I-2505 | 687 | | | | 2053.915 | 2054.8 | 2052.9 | |
| I-2506 | 332 | | | | 2053.915 | 1028 | 2052.9 | |
| I-2507 | 168 | | | | 2053.915 | 1028.1 | 2052.9 | |
| I-2508 | 152 | 27.3 | | | 2067.93 | 2068.9 | 2067 | |
| I-2509 | 17 | | | | 2067.93 | 2069 | 2067 | |
| I-2510 | 24 | 7.8 | | | 2067.93 | 1035.1 | 2066.9 | |
| I-2511 | 566 | | | | 2081.946 | 2082.9 | 2081 | |
| I-2512 | 245 | | | | 2081.946 | 2183.1 | 2181.2 | |
| I-2513 | 66 | >>20 | | | 2081.946 | 2082.9 | 2081 | |
| I-2514 | 74 | | | | 2081.946 | 2082.8 | 2080.9 | |
| I-2515 | 1608 | >>20 | | | 2081.946 | 1042.1 | 2080.9 | |
| I-2516 | 209 | | | | 2081.946 | 1042.1 | 2081 | |
| I-2517 | 61 | 30.0 | | | 2081.946 | 1042.1 | 2081 | |
| I-2518 | 212 | >>20 | | | 2053.915 | 2054.8 | 2052.9 | |
| I-2519 | 94 | | | | 2067.93 | 1035.1 | 2067.2 | |
| I-2520 | 27 | 5.9 | 5.7 | | 2140.994 | 1071.7 | 2140.3 | |
| I-2521 | 38 | 5.6 | 3.0 | | 2099.968 | 1051.2 | 2100 | |
| I-2522 | 219 | >>20 | | | 2103.054 | 2104.2 | 2102.1 | |
| I-2523 | 1732 | >>20 | | | 2165.07 | 2166.2 | 2164.2 | |
| I-2524 | 609 | | | | 2139.021 | 2140.2 | 2138.1 | |
| I-2525 | 4287 | | | | 2157.026 | 2158 | 2156.1 | |
| I-2526 | 224 | >>20 | | | 2279.159 | 2280.2 | 2278.3 | |
| I-2527 | 263 | >>20 | | | 2188.107 | 2189.3 | 2187.2 | |
| I-2528 | 610 | | | | 2160.112 | 2161.3 | 2159.2 | |
| I-2529 | 153 | 33.2 | | | 2055.93 | | | A |
| I-2530 | 102 | | | | 2041.915 | | | A |
| I-2531 | 179 | | | | 2043.93 | | | A |
| I-2532 | 14 | 4.5 | | >20 | 2081.946 | | | |
| I-2533 | 28 | 6.2 | | >20 | 2081.946 | 2083.1 | 2081.2 | |
| I-2534 | 21 | 4.4 | | | 2115.93 | 2117.2 | 2115.3 | |
| I-2535 | 11 | 3.7 | | | 2124.952 | | | |
| I-2536 | 13 | 4.5 | | | 2124.952 | 2126.1 | 2124.2 | |
| I-2537 | 11 | 2.9 | | | 2166.962 | 2168.2 | 2166.3 | |
| I-2538 | 14 | 3.5 | | | 2166.962 | 2168.1 | 2166.2 | |
| I-2539 | 11 | 3.6 | | | 2138.968 | 2140.2 | 2138.2 | |
| I-2540 | 14 | 3.5 | | | 2138.968 | | | |
| I-2541 | 21 | 4.7 | | >20 | 2123.957 | 2125.1 | 2123.2 | |
| I-2542 | 23 | 4.0 | | >20 | 2123.957 | 2125.1 | 2123.3 | |
| I-2543 | 37 | 7.3 | | | 2157.941 | 2159.1 | 2157.2 | |
| I-2544 | 11 | 4.1 | | | 2166.962 | 2168.1 | 2166.2 | |
| I-2545 | 16 | 4.0 | | | 2166.962 | 2168.1 | 2166.3 | |
| I-2546 | 13 | 3.5 | | | 2208.973 | | | |
| I-2547 | 13 | 3.5 | | | 2208.973 | 2210.1 | 2208.3 | |
| I-2548 | 11 | 3.6 | | | 2180.978 | 2182.1 | 2180.2 | |
| I-2549 | 13 | 2.5 | | | 2180.978 | 2182.2 | 2180.3 | |
| I-2550 | 1721 | | | | 2035.871 | 2036.7 | 2034.8 | |
| I-2551 | 8 | 9.8 | | | 2033.931 | 2035.2 | 2033.3 | |
| I-2552 | 12 | 10.4 | | | 2033.931 | 2035.2 | 2033.4 | |
| I-2553 | 10 | 8.2 | | | 2075.941 | 2077.2 | 2075.4 | |
| I-2554 | 8 | 3.3 | | | 2121.983 | 2123.6 | 2121.7 | |
| I-2555 | 11 | 22.1 | | | 2157.036 | 2458.7 | 2156.5 | |
| I-2556 | 6 | 7.0 | | | 2116.968 | 2118.3 | 2116.5 | |
| I-2557 | 29 | 19.6 | | | 2141.949 | 2143.2 | 2141.4 | |
| I-2558 | 7 | 14.7 | | | 2047.91 | 2049.2 | 2047.3 | |
| I-2559 | 8 | 3.8 | | | 2093.952 | 2095.5 | 2093.6 | |
| I-2560 | 9 | 19.3 | | | 2129.004 | 2130.8 | 2128.6 | |
| I-2561 | 5 | 7.2 | | | 2088.937 | 2090.2 | 2088.5 | |
| I-2562 | 10000 | | | | 2120.821 | 2123.3 | 2121.6 | |
| I-2563 | 48 | 17 | | | 2027.899 | 2029.2 | 2027.3 | |
| I-2564 | 259 | | | | 2055.93 | 2057.2 | 2055.2 | |
| I-2565 | 90 | 21 | | | 2055.93 | 2057.2 | 2055.3 | |
| I-2566 | 181 | | | | 2124.952 | 2126.3 | 2124.4 | |
| I-2567 | 522 | | | | 2152.983 | 2154.3 | 2152.4 | |
| I-2568 | 4770 | | | | 2183.953 | 2185.2 | 2183.1 | |
| I-2569 | 1948 | | | | 2241.958 | 1122.3 | 1120.3 | |
| I-2570 | 1278 | | | | 2031.93 | 2033.2 | 2031.3 | A |
| I-2571 | 42 | 24 | | | 2059.962 | 2061.2 | 2059.4 | A |
| I-2572 | 67 | >>20 | | | 2128.983 | 2130.3 | 2128.4 | A |
| I-2573 | 234 | | | | 2157.014 | 1079.8 | 1077.9 | A |
| I-2574 | 2960 | | | | 2130.999 | 2133.3 | 2131.2 | A |
| I-2575 | 8156 | | | | 2282.026 | 1133.3 | 1131.4 | |
| I-2576 | 6 | 16.1 | | >20 | 2009.858 | 2011.2 | 2009.4 | |
| I-2577 | 7 | 2.7 | | 9.5 | 2009.858 | 2011.4 | 2009.5 | |
| I-2578 | 5 | 5.5 | 4.1 | 7.7 | 2076.937 | 1639.7 | 1637.8 | |
| I-2579 | 41 | 4.7 | | 15.3 | 2138.968 | 1070.7 | 1068.8 | |
| I-2580 | 993 | | | | 2053.915 | 2055.5 | 2053.6 | |
| I-2581 | 205 | >>20 | | | 2067.93 | 2069.6 | 2067.8 | |
| I-2582 | 263 | >>20 | | | 2067.93 | 2069.6 | 2067.6 | |
| I-2583 | 224 | >>20 | | | 2081.946 | 2083.6 | 2081.9 | |
| I-2584 | 1840 | | | | 2053.915 | 2055.7 | 2053.9 | |
| I-2585 | 452 | | | | 2067.93 | 2069.8 | 2068.1 | |
| I-2586 | 345 | | | | 2067.93 | 2069.8 | 2068 | |
| I-2587 | 273 | | | | 2081.946 | 2083.7 | 2081.9 | |
| I-2588 | 26 | | | | 2005.899 | 2007.6 | 2005.8 | |
| I-2589 | 25 | 15.2 | | | 2005.899 | 2007.6 | 2005.8 | |
| I-2590 | 25 | 18.9 | | | 2019.915 | 2021.6 | 2019.8 | |
| I-2591 | 602 | | | | 1991.884 | 1993.6 | 1991.8 | |
| I-2592 | 37 | >>20 | | | 2005.899 | 2007.6 | 2005.5 | |
| I-2593 | 27 | 29.4 | | | 2005.899 | 2007.6 | 2006 | |
| I-2594 | 470 | >>20 | | | 2042.877 | 2044.5 | 2042.8 | B |
| I-2595 | 356 | >>20 | | | 2042.877 | 2044.5 | 2042.9 | B |
| I-2596 | 10000 | | | | 2069.91 | 2071.6 | 2069.9 | B |
| I-2597 | 726 | | | | 2069.91 | 2069.6 | 2067.7 | B |
| I-2598 | 1346 | | | | 1887.821 | 1889.4 | 1887.8 | |
| I-2599 | 234 | >>20 | | | 1873.806 | 1875.5 | 1873.9 | |
| I-2600 | 923 | | | | 1891.852 | 1893.5 | 1891.6 | A |
| I-2601 | 592 | | | | 1877.837 | 1879.5 | 1877.7 | A |
| I-2602 | 8217 | | | | 1963.852 | 1965.5 | 1963.7 | |
| I-2603 | 767 | | | | 1949.837 | 1951.5 | 1949.9 | |
| I-2604 | 1119 | | | | 1967.884 | 1969.6 | 1967.8 | A |
| I-2605 | 608 | | | | 1953.868 | 1955.5 | 1953.8 | A |
| I-2606 | 734 | | >>20 | | 1939.852 | 1941.8 | 1940.2 | A |
| I-2607 | 904 | | >>20 | | 2015.884 | 2017.9 | 2016.2 | A |
| I-2608 | 251 | | | | 1863.821 | 1865.9 | 1864.1 | A |
| I-2609 | 2651 | | | | 1905.868 | 1908 | 1906.2 | A |
| I-2610 | 215 | | | | 2039.899 | 2042.1 | 2040.2 | |
| I-2611 | 188 | | | | 2053.915 | 2056.1 | 2054.2 | |
| I-2612 | 85 | | | | 1991.884 | 1993.8 | 1991.7 | |
| I-2613 | 183 | | | | 2053.915 | 2056.1 | 2054.9 | |
| I-2614 | 97 | | | | 2053.915 | 2056.1 | 2054.3 | |
| I-2615 | 115 | | | | 2067.93 | 2070.1 | 2068.5 | |
| I-2616 | 175 | | | | 2067.93 | 2070.1 | 2068.3 | |
| I-2617 | 130 | | | | 1991.884 | 1993.7 | 1992.4 | |
| I-2618 | 77 | | | | 2005.899 | 2008.1 | 2006.3 | |
| I-2619 | 36 | | | | 2005.899 | 2008.2 | 2006.3 | |

[2628] Table E3. Certain peptides and compositions thereof as examples. Peptides are stapled unless indicated otherwise (among other things, the present disclosure also provides unstapled versions of such peptides, optionally protected with one or more protection group (e.g., protection of N-terminus, C-terminus, side chains, etc.), and intermediates thereof). As appreciated by those skilled in the art, stapling may provide more than one stereoisomers (e.g., E Z of double bonds and/or diastereomers), and a stereoisomer can be EE, EZ, ZE, or ZZ for a stapled peptide with two staples each independently comprising a double bond. In some embodiments, isomers (or combinations thereof) are listed separately (typically based on HPLC peaks in the order of elution: an earlier eluted peak is assigned a smaller ID number than each later eluted peaks (if any); for example, isomer composition 2 corresponding to a composition of a later eluting peak than isomer composition 1, isomer composition 3 corresponding to a composition of a later eluting peak than isomer composition 2, etc.; in some cases, a peak may contain more than one isomer; in some cases, isomers are not separated (or a single isomer), e.g., when there is one peak on HPLC (e.g., reverse phase HPLC as described in Examples above)). Compositions utilized in various assays are typically of stapled peptides; the present disclosure also provides peptides prior to stapling and compositions thereof. In some embodiments, a HPLC method is as follows: Xselect CSH C18 column 1.7 um 2.1×50 mm 130 A; Column temperature 40° C.; Flow 0.6 mL/min; 0.1% formic acid in both acetonitrile and water, 7.2 min gradient from 5 to 95% acetonitrile. In some embodiments, a different gradient and/or a C8 column may be used.

| | | SEQ |
|---|---|---|
| | | ID |
| ID | Description | NO: |
| I-1 | Ac-Phe-Asp-Ala-RdN-Asp-Asp-Ala-Ala-Phe-Val-S7-Phe-Trp-Gln-NH2 | 7 |
| I-2 | Ac-Phe-Asp-Ala-RdN-Asp-Asp-Ala-Ala-Phe-Val-S7-Phe-Trp-Gln-NH2 | 7 |
| I-3 | Ac-Phe-Asp-Ala-R8-Asp-Glu-Ala-Ala-Phe-Val-PyrS-Phe-Trp-Gln-NH2 | 8 |
| I-4 | Ac-Phe-Asp-Ala-R8-Asp-Glu-Ala-Ala-Phe-Val-PyrS-Phe-Trp-Gln-NH2 | 8 |
| I-5 | Ac-Phe-Asp-Ala-R8-Asp-Aad-Ala-Ala-Phe-Val-PyrS-Phe-Trp-Gln-NH2 | 9 |
| I-6 | Ac-Phe-Asp-Ala-R8-Asp-Aad-Ala-Ala-Phe-Val-PyrS-Phe-Trp-Gln-NH2 | 9 |
| I-7 | Ac-Phe-Asp-Ala-R8-Asp-4COOHF-Ala-Ala-Phe-Val-PyrS-Phe-Trp-Gln-NH2 | 10 |
| I-8 | Ac-Phe-Asp-Ala-R8-Asp-4COOHF-Ala-Ala-Phe-Val-PyrS-Phe-Trp-Gln-NH2 | 10 |
| I-9 | Ac-Phe-Asp-Ala-R8-Asp-3PyrA-Ala-Ala-Phe-Val-PyrS-Phe-Trp-Gln-NH2 | 11 |
| I-10 | Ac-Phe-Asp-Ala-R8-Asp-3PyrA-Ala-Ala-Phe-Val-PyrS-Phe-Trp-Gln-NH2 | 11 |
| I-11 | Ac-Phe-Asp-Ala-R8-Asp-Bip-Ala-Ala-Phe-Val-PyrS-Phe-Trp-Gln-NH2 | 12 |
| I-12 | Ac-Phe-Asp-Ala-R8-Asp-Bip-Ala-Ala-Phe-Val-PyrS-Phe-Trp-Gln-NH2 | 12 |
| I-13 | Ac-Phe-Asp-Ala-R8-Asp-nLeu-Ala-Ala-Phe-Val-PyrS-Phe-Trp-Gln-NH2 | 13 |
| I-14 | Ac-Phe-Asp-Ala-R8-Asp-nLeu-Ala-Ala-Phe-Val-PyrS-Phe-Trp-Gln-NH2 | 13 |
| I-15 | Ac-Phe-Asp-Ala-R8-Asp-Cha-Ala-Ala-Phe-Val-PyrS-Phe-Trp-Gln-NH2 | 14 |
| I-16 | Ac-Phe-Asp-Ala-R8-Asp-Cha-Ala-Ala-Phe-Val-PyrS-Phe-Trp-Gln-NH2 | 14 |
| I-17 | Ac-Phe-Asp-Ala-R8-Asp-hLeu-Ala-Ala-Phe-Val-PyrS-Phe-Trp-Gln-NH2 | 15 |
| I-18 | Ac-Phe-Asp-Ala-R8-Asp-hLeu-Ala-Ala-Phe-Val-PyrS-Phe-Trp-Gln-NH2 | 15 |
| I-19 | Ac-Phe-Asp-Ala-R8-Asp-Asp-Ala-Asp-Phe-Val-PyrS-Phe-Trp-Gln-NH2 | 16 |
| I-20 | Ac-Phe-Asp-Ala-R8-Asp-Asp-Ala-Asp-Phe-Val-PyrS-Phe-Trp-Gln-NH2 | 16 |
| I-21 | Ac-Phe-Asp-Ala-R8-Asp-Asp-Ala-Glu-Phe-Val-PyrS-Phe-Trp-Gln-NH2 | 17 |
| I-22 | Ac-Phe-Asp-Ala-R8-Asp-Asp-Ala-Glu-Phe-Val-PyrS-Phe-Trp-Gln-NH2 | 17 |
| I-23 | Ac-Phe-Asp-Ala-R8-Asp-Asp-Ala-Aad-Phe-Val-PyrS-Phe-Trp-Gln-NH2 | 18 |
| I-24 | Ac-Phe-Asp-Ala-R8-Asp-Asp-Ala-Aad-Phe-Val-PyrS-Phe-Trp-Gln-NH2 | 18 |
| I-25 | Ac-Phe-Asp-Ala-R5-Asp-Asp-Ala-Ala-Phe-Val-SeN-Phe-Trp-Gln-NH2 | 19 |
| I-26 | Ac-Phe-Asp-Ala-R6-Asp-Asp-Ala-Ala-Phe-Val-SeN-Phe-Trp-Gln-NH2 | 20 |
| I-27 | Ac-Phe-Asp-Ala-ReN-Asp-Asp-Ala-Ala-Phe-Val-S5-Phe-Trp-Gln-NH2 | 21 |
| I-28 | Ac-Phe-Asp-Ala-ReN-Asp-Asp-Ala-Ala-Phe-Val-S6-Phe-Trp-Gln-NH2 | 22 |
| I-29 | Ac-Phe-Asp-Ala-ReN-Asp-Asp-Ala-Ala-Phe-Val-S6-Phe-Trp-Gln-NH2 | 22 |
| I-30 | Ac-Phe-Asp-Ala-R7-Asp-Asp-Ala-Ala-Phe-Val-PyrS-Phe-Trp-Gln-NH2 | 23 |
| I-31 | Ac-Phe-Asp-Ala-R7-Asp-Asp-Ala-Ala-Phe-Val-PyrS-Phe-Trp-Gln-NH2 | 23 |
| I-32 | Ac-Phe-Asp-Ala-Az-Asp-Asp-Ala-Ala-Phe-Val-S7-Phe-Trp-Gln-NH2 | 24 |
| I-33 | Ac-Phe-Asp-Ala-Az-Asp-Asp-Ala-Ala-Phe-Val-S7-Phe-Trp-Gln-NH2 | 24 |
| I-34 | Ac-Phe-Asp-Ala-R8-Asp-Asp-Ala-Ala-Phe-Val-SgN-Phe-Trp-Gln-NH2 | 25 |
| I-35 | Ac-Phe-Asp-Ala-Az-Asp-Asp-Ala-Ala-Phe-Val-S8-Phe-Trp-Gln-NH2 | 26 |
| I-36 | Ac-Phe-Asp-Ala-R4-Asp-Asp-Ala-Ala-Phe-Val-SeN-Phe-Trp-Gln-NH2 | 27 |
| I-37 | Ac-Phe-Asp-Ala-R5-Asp-Asp-Ala-Ala-Phe-Val-SdN-Phe-Trp-Gln-NH2 | 28 |
| I-38 | Ac-Phe-Asp-Ala-R7-Asp-Asp-Ala-Ala-Phe-Val-Az-Phe-Trp-Gln-NH2 | 29 |
| I-39 | Ac-Phe-Asp-Ala-R8-Asp-Asp-Ala-Ala-Phe-Val-Az-Phe-Trp-Gln-NH2 | 30 |
| I-40 | Ac-Phe-Asp-Ala-R8-Asp-Asp-Ala-Ala-Phe-Val-Az-Phe-Trp-Gln-NH2 | 30 |
| I-41 | Ac-Phe-Asp-Ala-RdN-Asp-Asp-Ala-Ala-Phe-Val-S4-Phe-Trp-Gln-NH2 | 31 |
| I-42 | Ac-Phe-Asp-Ala-RdN-Asp-Asp-Ala-Ala-Phe-Val-S4-Phe-Trp-Gln-NH2 | 31 |
| I-43 | Ac-Phe-Asp-Ala-RgN-Asp-Asp-Ala-Ala-Phe-Val-S8-Phe-Trp-Gln-NH2 | 32 |
| I-44 | Ac-Phe-Asp-Ala-RgN-Asp-Asp-Ala-Ala-Phe-Val-S8-Phe-Trp-Gln-NH2 | 32 |
| I-45 | Ac-Phe-Asp-Ala-RgN-Asp-Asp-Ala-Ala-Phe-Val-S7-Phe-Trp-Gln-NH2 | 33 |
| I-46 | Ac-Phe-Asp-Ala-RgN-Asp-Asp-Ala-Ala-Phe-Val-S7-Phe-Trp-Gln-NH2 | 33 |
| I-47 | Ac-Phe-Asp-R8-Ala-Asp-Asp-Ala-Ala-Phe-S5-Ala-Phe-Trp-Gln-NH2 | 34 |
| I-48 | Ac-Phe-Asp-R8-Ala-Asp-Asp-Ala-Ala-Phe-S5-Ala-Phe-Trp-Gln-NH2 | 34 |
| I-49 | Ac-Phe-Asp-RdN-Ala-Asp-Asp-Ala-Ala-Phe-S7-Ala-Phe-Trp-Gln-NH2 | 35 |
| I-50 | Ac-Phe-Asp-RdN-Ala-Asp-Asp-Ala-Ala-Phe-S7-Ala-Phe-Trp-Gln-NH2 | 35 |
| I-51 | Ac-Phe-Asp-R8-Ala-Asp-Asp-Ala-Ala-Phe-PyrS-Ala-Phe-Trp-Gln-NH2 | 36 |
| I-52 | Ac-PL3-Asp-Ala-B5-Asp-Asp-Ala-Ala-Phe-Val-S8-Phe-Trp-Gln-NH2 | 37 |
| I-53 | Ac-PL3-Asp-Ala-B5-Asp-Asp-Ala-Ala-Phe-Val-SeN-Phe-Trp-Gln-NH2 | 38 |
| I-54 | Ac-PL3-Asp-Ala-B5-Asp-Asp-Ala-Ala-Phe-Val-SeN-Phe-Trp-Gln-NH2 | 38 |
| I-55 | Ac-PL3-Asp-Ala-B5-Asp-Asp-Ala-Ala-Phe-Val-SdN-Phe-Trp-Gln-NH2 | 39 |
| I-56 | Ac-Phe-Asp-Ala-R8-Asp-aMeDF-Ala-Ala-Phe-Val-PyrS-Phe-Trp-Gln-NH2 | 40 |
| I-57 | Ac-Phe-Asp-Ala-R8-Asp-aMeDF-Ala-Ala-Phe-Val-PyrS-Phe-Trp-Gln-NH2 | 40 |
| I-58 | Ac-Phe-Asp-Ala-R8-Asp-Gln-Ala-Ala-Phe-Val-PyrS-Phe-Trp-Gln-NH2 | 41 |
| I-59 | Ac-Phe-Asp-Ala-R8-Asp-Gln-Ala-Ala-Phe-Val-PyrS-Phe-Trp-Gln-NH2 | 41 |
| I-60 | Ac-Phe-Asp-Ala-R8-Asp-Asp-Ala-Ala-Phe-Val-PyrS-Cha-Trp-Gln-NH2 | 42 |
| I-61 | Ac-Phe-Asp-Ala-R8-Asp-Asp-Ala-Ala-Phe-Val-PyrS-Cha-Trp-Gln-NH2 | 42 |
| I-62 | Ac-Phe-Asp-Ala-R8-Asp-Asp-Ala-Ala-Phe-Val-PyrS-Tyr-Trp-Gln-NH2 | 43 |
| I-63 | Ac-Phe-Asp-Ala-R8-Asp-Asp-Ala-Ala-Phe-Val-PyrS-Tyr-Trp-Gln-NH2 | 43 |
| I-64 | Ac-Ala-Asp-Ile-RdN-Asp-Asp-Ala-Ala-Phe-Gln-S7-Phe-Trp-His-NH2 | 44 |
| I-65 | Ac-Ala-Asp-Ile-RdN-Asp-Asp-Ala-Ala-Phe-Gln-S7-Phe-Trp-His-NH2 | 44 |
| I-66 | Ac-Ala-Asp-Ile-RdN-Asp-Glu-Ala-Ala-Phe-Gln-S7-Phe-Trp-His-NH2 | 45 |
| I-67 | Ac-Ala-Asp-Ile-RdN-Asp-Glu-Ala-Ala-Phe-Gln-S7-Phe-Trp-His-NH2 | 45 |
| I-68 | Ac-Ala-Asp-Ile-RdN-Asp-nLeu-Ala-Ala-Phe-Gln-S7-Phe-Trp-His-NH2 | 46 |
| I-69 | Ac-Ala-Asp-Ile-RdN-Asp-nLeu-Ala-Ala-Phe-Gln-S7-Phe-Trp-His-NH2 | 46 |
| I-70 | Ac-Ala-Asp-Ile-RdN-Asp-hLeu-Ala-Ala-Phe-Gln-S7-Phe-Trp-His-NH2 | 47 |
| I-71 | Ac-Ala-Asp-Ile-RdN-Asp-hLeu-Ala-Ala-Phe-Gln-S7-Phe-Trp-His-NH2 | 47 |
| I-72 | Ac-Ala-Asp-Ile-RdN-Asp-Cha-Ala-Ala-Phe-Gln-S7-Phe-Trp-His-NH2 | 48 |
| I-73 | Ac-Ala-Asp-Ile-RdN-Asp-Cha-Ala-Ala-Phe-Gln-S7-Phe-Trp-His-NH2 | 48 |
| I-74 | Ac-Phe-Asp-Ala-R8-Asp-Asp-Ala-Ala-Cha-Val-PyrS-Phe-Trp-Gln-NH2 | 49 |
| I-75 | Ac-Phe-Asp-Ala-R8-Asp-Asp-Ala-Ala-Cha-Val-PyrS-Phe-Trp-Gln-NH2 | 49 |
| I-76 | Ac-Phe-Asp-Ala-R8-Asp-Asp-Ala-Ala-nLeu-Val-PyrS-Phe-Trp-Gln-NH2 | 50 |
| I-77 | Ac-Phe-Asp-Ala-R8-Asp-Asp-Ala-Ala-3FF-Val-PyrS-Phe-Trp-Gln-NH2 | 51 |
| I-78 | Ac-Phe-Asp-Ala-R8-Asp-Asp-Ala-Ala-4FF-Val-PyrS-Phe-Trp-Gln-NH2 | 52 |
| I-79 | Ac-Phe-Asp-Ala-R8-Asp-Asp-Ala-Ala-34FF-Val-PyrS-Phe-Trp-Gln-NH2 | 53 |
| I-80 | Ac-Phe-Asp-Ala-R8-Asp-Asp-Ala-Ala-Phe-Val-PyrS-2PyrA-Trp-Gln-NH2 | 54 |
| I-81 | Ac-Phe-Asp-Ala-R8-Asp-Asp-Ala-Ala-Phe-Val-PyrS-2PyrA-Trp-Gln-NH2 | 54 |
| I-82 | Ac-Phe-Asp-Ala-R8-Asp-Asp-Ala-Ala-Phe-Val-PyrS-3PyrA-Trp-Gln-NH2 | 55 |
| I-83 | Ac-Phe-Asp-Ala-R8-Asp-Asp-Ala-Ala-Phe-Val-PyrS-3PyrA-Trp-Gln-NH2 | 55 |
| I-84 | Ac-Phe-Asp-Ala-R8-Asp-Asp-Ala-Ala-Phe-Val-PyrS-4PyrA-Trp-Gln-NH2 | 56 |
| I-85 | Ac-Phe-Asp-Ala-R8-Asp-Asp-Ala-Ala-Phe-Val-PyrS-4PyrA-Trp-Gln-NH2 | 56 |
| I-86 | Ac-Phe-Asp-Ala-R8-Asp-Asp-Ala-Ala-2PyrA-Val-PyrS-Phe-Trp-Gln-NH2 | 57 |
| I-87 | Ac-Phe-Asp-Ala-R8-Asp-Asp-Ala-Ala-3PyrA-Val-PyrS-Phe-Trp-Gln-NH2 | 58 |
| I-88 | Ac-Phe-Asp-Ala-R8-Asp-Asp-Ala-Ala-3PyrA-Val-PyrS-Phe-Trp-Gln-NH2 | 58 |
| I-89 | Ac-Phe-Asp-Ala-R8-Asp-Asp-Ala-Ala-Phe-Val-PyrS-4CBMF-Trp-Gln-NH2 | 59 |
| I-90 | Ac-Phe-Asp-Ala-R8-Asp-Asp-Ala-Ala-Phe-Val-PyrS-4CBMF-Trp-Gln-NH2 | 59 |
| I-91 | Ac-Phe-Asp-Ala-R8-Asp-Asp-Ala-Ala-4CBMF-Val-PyrS-Phe-Trp-Gln-NH2 | 60 |
| I-92 | Ac-Phe-Asp-Ala-R8-Asp-Asp-Ala-Ala-4CBMF-Val-PyrS-Phe-Trp-Gln-NH2 | 60 |
| I-93 | Ac-Phe-Asp-Ala-R8-Asp-Asp-Ala-Ala-Phe-Val-PyrS-CypA-Trp-Gln-NH2 | 61 |
| I-94 | Ac-Phe-Asp-Ala-R8-Asp-Asp-Ala-Ala-Phe-Val-PyrS-CypA-Trp-Gln-NH2 | 61 |
| I-95 | Ac-Phe-Asp-Ala-R8-Asp-Asp-Ala-Ala-CypA-Val-PyrS-Phe-Trp-Gln-NH2 | 62 |
| I-96 | Ac-Phe-Asp-Ala-R8-Asp-Asp-Ala-Ala-CypA-Val-PyrS-Phe-Trp-Gln-NH2 | 62 |
| I-97 | Ac-Phe-Asp-Ala-R8-Asp-hPhe-Ala-Ala-Phe-Val-PyrS-Phe-Trp-Gln-NH2 | 63 |
| I-98 | Ac-Phe-Asp-Ala-R8-Asp-hPhe-Ala-Ala-Phe-Val-PyrS-Phe-Trp-Gln-NH2 | 63 |
| I-99 | Ac-Phe-Asp-Ala-R8-Asp-Phe-Ala-Ala-Phe-Val-PyrS-Phe-Trp-Gln-NH2 | 64 |
| I-100 | Ac-Phe-Asp-Ala-R8-Asp-Phe-Ala-Ala-Phe-Val-PyrS-Phe-Trp-Gln-NH2 | 64 |
| I-101 | Ac-Phe-Asp-Ala-R8-Asp-Asp-Ala-Ala-Phe-Val-PyrS-3OMeF-Trp-Gln-NH2 | 65 |
| I-102 | Ac-Phe-Asp-Ala-R8-Asp-Asp-Ala-Ala-Phe-Val-PyrS-3OMeF-Trp-Gln-NH2 | 65 |
| I-103 | Ac-Phe-Asp-Ala-R8-Asp-Asp-Ala-Ala-3OMeF-Val-PyrS-Phe-Trp-Gln-NH2 | 66 |
| I-104 | Ac-Phe-Asp-Ala-R8-Asp-Asp-Ala-Ala-3OMeF-Val-PyrS-Phe-Trp-Gln-NH2 | 66 |
| I-105 | Ac-Phe-Asp-Ala-R8-Asp-Asp-Ala-Ala-Phe-Val-PyrS-2CBMF-Trp-Gln-NH2 | 67 |
| I-106 | Ac-Phe-Asp-Ala-R8-Asp-Asp-Ala-Ala-Phe-Val-PyrS-2CBMF-Trp-Gln-NH2 | 67 |
| I-107 | Ac-Phe-Asp-Ala-R8-Asp-Asp-Ala-Ala-Phe-Val-PyrS-3CBMF-Trp-Gln-NH2 | 68 |
| I-108 | Ac-Phe-Asp-Ala-R8-Asp-Asp-Ala-Ala-3CBMF-Val-PyrS-Phe-Trp-Gln-NH2 | 69 |
| I-109 | Ac-Phe-Asp-Ala-R8-Asp-Asp-Ala-Ala-3CBMF-Val-PyrS-Phe-Trp-Gln-NH2 | 69 |
| I-110 | Ac-Phe-Asp-Ala-R8-Asp-Asp-Ala-Ala-Phe-Val-PyrS-4COOHF-Trp-Gln-NH2 | 70 |
| I-111 | Ac-Phe-Asp-Ala-R8-Asp-Asp-Ala-Ala-Phe-Val-PyrS-4COOHF-Trp-Gln-NH2 | 70 |
| I-112 | Ac-Phe-Asp-Ala-R8-Asp-Asp-Ala-Ala-2NapA-Val-PyrS-Phe-Trp-Gln-NH2 | 71 |
| I-113 | Ac-Phe-Asp-Ala-R8-Asp-Asp-Ala-Ala-2NapA-Val-PyrS-Phe-Trp-Gln-NH2 | 71 |
| I-114 | Ac-Phe-Asp-Ala-R8-Asp-1NapA-Ala-Ala-Phe-Val-PyrS-Phe-Trp-Gln-NH2 | 72 |
| I-115 | Ac-Phe-Asp-Ala-R8-Asp-2NapA-Ala-Ala-Phe-Val-PyrS-Phe-Trp-Gln-NH2 | 73 |
| I-116 | Ac-Phe-Asp-Ala-R8-Asp-2NapA-Ala-Ala-Phe-Val-PyrS-Phe-Trp-Gln-NH2 | 73 |
| I-117 | Ac-Phe-Asp-Ala-R8-Asp-Asp-Ala-Ala-hPhe-Val-PyrS-Phe-Trp-Gln-NH2 | 74 |
| I-118 | Ac-Phe-Asp-Ala-R8-Asp-Asp-Ala-Ala-hPhe-Val-PyrS-Phe-Trp-Gln-NH2 | 74 |
| I-119 | Ac-Phe-Asp-Ala-R8-Asp-Asp-Ala-Ala-hTyr-Val-PyrS-Phe-Trp-Gln-NH2 | 75 |
| I-120 | Ac-Phe-Asp-Ala-R8-Asp-Asp-Ala-Ala-hTyr-Val-PyrS-Phe-Trp-Gln-NH2 | 75 |
| I-121 | Ac-Phe-Asp-Ala-R8-Asp-Asp-Ala-Ala-Phe-Val-PyrS-Asp-Trp-Gln-NH2 | 76 |
| I-122 | Ac-Phe-Asp-Ala-R8-Asp-Asp-Ala-Ala-Phe-Val-PyrS-Asp-Trp-Gln-NH2 | 76 |
| I-123 | Ac-PL3-Asp-Ala-B5-Asp-Glu-Ala-Ala-Phe-Val-S8-Phe-Trp-Gln-NH2 | 77 |
| I-124 | Ac-PL3-Asp-Ala-B5-Asp-Asn-Ala-Ala-Phe-Val-S8-Phe-Trp-Gln-NH2 | 78 |
| I-125 | Ac-PL3-Asp-Ala-B5-Asp-Asn-Ala-Ala-Phe-Val-S8-Phe-Trp-Gln-NH2 | 78 |
| I-126 | Ac-PL3-Asp-Ala-B5-Asp-Gln-Ala-Ala-Phe-Val-S8-Phe-Trp-Gln-NH2 | 79 |
| I-127 | Ac-PL3-Asp-Ala-B5-Asp-Gln-Ala-Ala-Phe-Val-S8-Phe-Trp-Gln-NH2 | 79 |
| I-128 | Ac-PL3-Asp-Ala-B5-Asp-Glu-Ala-Ala-Phe-Val-S8-Phe-Trp-NH2 | 80 |
| I-129 | Ac-PL3-Asp-Ala-B5-Asp-Aad-Ala-Ala-Phe-Val-S8-Phe-Trp-Gln-NH2 | 81 |
| I-130 | Ac-PL3-Asp-Ala-B5-Asp-Glu-Ala-Ala-Phe-Val-SeN-Phe-Trp-Gln-NH2 | 82 |
| I-131 | Ac-PL3-Asp-Ala-B5-Asp-Glu-Ala-Ala-Phe-Val-SeN-Phe-Trp-Gln-NH2 | 82 |
| I-132 | Ac-PL3-Asp-Ala-B5-Asp-Glu-Ala-Ala-Phe-Val-S7-Phe-Trp-Gln-NH2 | 83 |
| I-133 | Ac-PL3-Asp-Ala-B5-Asp-Glu-Ala-Ala-Phe-Val-S8-Phe-Trp-Aib-NH2 | 84 |
| I-134 | Ac-PL3-Asp-Ala-B5-Asp-Glu-Ala-Ala-Phe-Val-S8-Phe-Trp-Aib-NH2 | 84 |
| I-135 | Ac-PL3-Asp-Ala-B5-Asp-Glu-Ala-Ala-Phe-Val-S8-Phe-Trp-Ala-NH2 | 85 |
| I-136 | Ac-PL3-Asp-Ala-B5-Asp-Glu-Ala-Ala-Phe-Val-S8-Phe-aMeW-Gln-NH2 | 86 |
| I-137 | Ac-PL3-Asp-Ala-B5-Asp-Glu-Ala-Ala-Phe-Val-S8-Phe-aMeW-Gln-NH2 | 86 |
| I-138 | Ac-PL3-Asp-Ala-B5-Asp-nLeu-Ala-Ala-Phe-Val-S8-Phe-Trp-Gln-NH2 | 87 |
| I-139 | Ac-PL3-Asp-Ala-B5-Asp-nLeu-Ala-Ala-Phe-Val-S8-Phe-Trp-Gln-NH2 | 87 |
| I-140 | Ac-PL3-Asp-Ala-B5-Asp-Glu-Ala-Ala-Phe-Val-S8-Phe-2NapA-Gln-NH2 | 88 |
| I-141 | Ac-PL3-Asp-Ala-B5-Asp-Glu-Ala-Ala-Phe-Val-S8-Phe-2NapA-NH2 | 89 |
| I-142 | Ac-PL3-Asp-Ala-B5-Asp-Glu-Ala-Ala-Phe-Val-S8-Phe-6F1NapA-Gln-NH2 | 90 |
| I-143 | Ac-PL3-Asp-Ala-B5-Asp-Glu-Ala-Ala-Phe-Val-S8-Phe-Qui-Gln-NH2 | 91 |
| I-144 | Ac-PL3-Asp-Ala-B5-Asp-Glu-Ala-Ala-Phe-Val-S8-Phe-BztA-Gln-NH2 | 92 |
| I-145 | Ac-PL3-Asp-Ala-B5-Asp-Glu-Ala-Ala-Phe-Val-S8-Phe-Bip-Gln-NH2 | 93 |
| I-146 | Ac-PL3-Asp-Ala-B5-Asp-Glu-Ala-Ala-Phe-Val-S8-Phe-5FW-Gln-NH2 | 94 |
| I-147 | Ac-Aib-Asp-Ile-RdN-Asp-Glu-Ala-Ala-Phe-Gln-S7-Phe-Trp-NH2 | 95 |
| I-148 | Ac-Ala-Asp-Ile-RdN-Asp-Glu-Ala-Ala-Phe-Gln-S7-Phe-Trp-NH2 | 96 |
| I-149 | Ac-Asp-Ile-RdN-Asp-Asp-Ala-Ala-Phe-Gln-S7-Phe-Trp-His-NH2 | 97 |
| I-150 | Ac-Asp-Ile-RdN-Asp-Asp-Ala-Ala-Phe-Gln-S7-Phe-Trp-His-NH2 | 97 |
| I-151 | Ac-Asp-Ile-RdN-Asp-Asp-Ala-Ala-Phe-Gln-S7-Phe-Trp-NH2 | 98 |
| I-152 | Ac-Ala-Asp-Ile-RdN-Asp-Glu-Ala-Ala-Phe-Ala-S7-Phe-Trp-His-NH2 | 99 |
| I-153 | Ac-Ala-Asp-Ile-RdN-Asp-Glu-Ala-Ala-Phe-Gln-S7-Phe-Trp-Ala-NH2 | 100 |
| I-154 | Ac-Ala-Asp-Ile-RdN-Asp-Glu-Ala-Ala-Phe-Ala-S7-Phe-Trp-Ala-NH2 | 101 |
| I-155 | Ac-Ala-Asp-Ile-RdN-Asp-Glu-Ala-Ala-Phe-Ala-S7-Phe-Trp-Ala-NH2 | 101 |
| I-156 | Ac-Ala-Asp-Ala-RdN-Asp-Glu-Ala-Ala-Phe-Gln-S7-Phe-Trp-His-NH2 | 102 |
| I-157 | Ac-Aib-Asp-Ala-R8-Asp-Glu-Ala-Ala-Phe-Val-PyrS-Phe-Trp-Gln-NH2 | 103 |
| I-158 | Ac-Aib-Asp-Ala-R8-Asp-Glu-Ala-Ala-Phe-Val-PyrS-Phe-Trp-Gln-NH2 | 103 |
| I-159 | Ac-Aib-Asp-Ala-R8-Asp-Glu-Ala-Ala-Phe-Val-PyrS-Phe-Trp-Aib-NH2 | 104 |
| I-160 | Ac-Aib-Asp-Ala-R8-Asp-Glu-Ala-Ala-Phe-Val-PyrS-Phe-Trp-Aib-NH2 | 104 |
| I-161 | Ac-Phe-Asp-Ala-R8-Asp-Asp-Ala-Ala-Phe-Val-PyrS-Glu-Trp-Gln-NH2 | 105 |
| I-162 | Ac-Phe-Asp-Ala-R8-Asp-Asp-Ala-Ala-Phe-Val-PyrS-Glu-Trp-Gln-NH2 | 105 |
| I-163 | Ac-Phe-Asp-Ala-R8-Asp-Asp-Ala-Ala-Phe-Ser-PyrS-Phe-Trp-Gln-NH2 | 106 |
| I-164 | Ac-Phe-Asp-Ala-R8-Asp-Asp-Ala-Ala-Phe-Ser-PyrS-Phe-Trp-Gln-NH2 | 106 |
| I-165 | Ac-PL3-Asp-Ala-B5-Asp-Glu-Ala-Ala-Phe-Val-S8-Phe-5MeOW-Gln-NH2 | 107 |
| I-166 | Ac-PL3-Asp-Ala-B5-Asp-Glu-Ala-Ala-Phe-Val-S8-Phe-7FW-Gln-NH2 | 108 |
| I-167 | Ac-PL3-Asp-Ala-B5-Asp-Glu-Ala-Ala-Phe-Val-S8-Phe-H2Trp-Gln-NH2 | 109 |
| I-168 | Ac-PL3-Asp-Ala-B5-Asp-Glu-Ala-Ala-Phe-Val-S8-Phe-H2Trp-Gln-NH2 | 109 |
| I-169 | Ac-PL3-Asp-Ala-B5-Asp-Glu-Ala-Ala-Phe-Val-S8-Phe-5CF3W-Gln-NH2 | 110 |
| I-170 | Ac-PL3-Asp-Ala-B5-Asp-Glu-Ala-Ala-Phe-Val-S8-Phe-5CpW-Gln-NH2 | 111 |
| I-171 | Ac-PL3-Asp-Ala-B5-Asp-Glu-Ala-Ala-Phe-Val-S8-Phe-5CpW-Gln-NH2 | 111 |
| I-172 | Ac-PL3-Asp-Ala-B5-Asp-EtGA-Ala-Ala-Phe-Val-S8-Phe-Trp-Gln-NH2 | 112 |
| I-173 | Ac-PL3-Asp-Ala-B5-Asp-EtGA-Ala-Ala-Phe-Val-S8-Phe-Trp-Gln-NH2 | 112 |
| I-174 | Ac-PL3-Asp-Ile-B5-Asp-Asp-Ala-Ala-Phe-Gln-S8-Phe-Trp-His-NH2 | 113 |
| I-175 | Ac-PL3-Asp-Ile-B5-Asp-Asp-Ala-Ala-Phe-Gln-S8-Phe-Trp-His-NH2 | 113 |
| I-176 | Ac-PL3-Asp-Ile-B5-Asp-Glu-Ala-Ala-Phe-Val-S8-Phe-Trp-His-NH2 | 114 |
| I-177 | Ac-PL3-Asp-Ile-B5-Asp-Glu-Ala-Ala-Phe-Val-S8-Phe-Trp-His-NH2 | 114 |
| I-178 | Ac-PL3-Asp-Ala-B5-Asp-Glu-Ala-Ala-Phe-Gln-S8-Phe-Trp-His-NH2 | 115 |
| I-179 | Ac-PL3-Asp-Ala-B5-Asp-Glu-Ala-Ala-Phe-Gln-S8-Phe-Trp-His-NH2 | 115 |
| I-180 | Ac-PL3-Asp-Ile-B5-Asp-Glu-Ala-Ala-Phe-Gln-S8-Phe-Trp-Gln-NH2 | 116 |
| I-181 | Ac-PL3-Asp-Ile-B5-Asp-Glu-Ala-Ala-Phe-Gln-S8-Phe-Trp-Gln-NH2 | 116 |
| I-182 | Ac-PL3-Asp-Ala-B5-Asp-DGlu-Ala-Ala-Phe-Val-S8-Phe-Trp-Gln-NH2 | 117 |
| I-183 | Ac-PL3-Asp-Ala-B5-Asp-Glu-Ala-Ala-Phe-Val-S8-Pff-Trp-Gln-NH2 | 118 |
| I-184 | Ac-PL3-Asp-Ala-B5-Asp-Glu-Ala-Ala-34FF-Val-S8-Phe-2NapA-Gln-NH2 | 119 |
| I-185 | Ac-PL3-Asp-Ala-B5-Asp-Glu-Ala-Ala-34FF-Ala-S8-Phe-2NapA-Ala-NH2 | 120 |
| I-186 | Ac-PL3-Asp-Ala-B5-Asp-Glu-Ala-Ala-Phe-Ala-S8-Phe-Trp-Ala-NH2 | 121 |
| I-187 | Ac-PL3-Asp-Ala-B5-Asp-Glu-Ala-Ala-Phe-Ala-S8-Phe-Trp-Ala-NH2 | 121 |
| I-188 | Ac-PL3-Asp-Ile-B5-Asp-Asp-Ala-Ala-Phe-Gln-SeN-Phe-Trp-His-NH2 | 122 |
| I-189 | Ac-PL3-Asp-Ile-B5-Asp-Asp-Ala-Ala-Phe-Gln-SeN-Phe-Trp-His-NH2 | 122 |
| I-190 | Ac-PL3-Asp-Ile-B5-Asp-Asp-Ala-Ala-Phe-Gln-SeN-Phe-Trp-His-NH2 | 122 |
| I-191 | Ac-PL3-Asp-Ile-B5-Asp-Glu-Ala-Ala-Phe-Gln-S8-Phe-Trp-NH2 | 123 |
| I-192 | Ac-PL3-Asp-Ile-B5-Asp-Glu-Ala-Ala-Phe-Gln-S8-Phe-Trp-NH2 | 123 |
| I-193 | Ac-PL3-Asp-Ile-B5-Asp-Glu-Ala-Ala-Phe-Gln-S8-Phe-Trp-NH2 | 123 |
| I-194 | Ac-PL3-Asp-Ile-B5-Asp-Glu-Ala-Ala-Phe-Gln-S8-Phe-Trp-Ala-NH2 | 124 |
| I-195 | Ac-PL3-Asp-Ala-B5-Asp-hPhe-Ala-Ala-Phe-Val-S8-Phe-Trp-Gln-NH2 | 125 |
| I-196 | Ac-PL3-Asp-Ala-B5-hPhe-Glu-Ala-Ala-Phe-Val-S8-Phe-Trp-Gln-NH2 | 126 |
| I-197 | Ac-PL3-Asp-Ala-B5-hPhe-Glu-Ala-Ala-Phe-Val-S8-Phe-Trp-Gln-NH2 | 126 |
| I-198 | Ac-PL3-Asp-Ala-B5-Asn-Glu-Ala-Ala-Phe-Val-S8-Phe-Trp-Gln-NH2 | 127 |
| I-199 | Ac-PL3-Asn-Ala-B5-Asp-Glu-Ala-Ala-Phe-Val-S8-Phe-Trp-Gln-NH2 | 128 |
| I-200 | Ac-PL3-Asn-Ala-B5-Asp-Glu-Ala-Ala-Phe-Val-S8-Phe-Trp-Gln-NH2 | 128 |
| I-201 | Ac-PL3-Phe-Ala-B5-Asp-Glu-Ala-Ala-Phe-Val-S8-Phe-Trp-Gln-NH2 | 129 |
| I-202 | Ac-PL3-Tyr-Ala-B5-Asp-Glu-Ala-Ala-Phe-Val-S8-Phe-Trp-Gln-NH2 | 130 |
| I-203 | Ac-PL3-3MeF-Ala-B5-Asp-Glu-Ala-Ala-Phe-Val-S8-Phe-Trp-Gln-NH2 | 131 |
| I-204 | Ac-PL3-3FF-Ala-B5-Asp-Glu-Ala-Ala-Phe-Val-S8-Phe-Trp-Gln-NH2 | 132 |
| I-205 | Ac-PL3-Asp-Ala-B5-nLeu-Glu-Ala-Ala-Phe-Val-S8-Phe-Trp-Gln-NH2 | 133 |
| I-206 | Ac-PL3-Asp-Ala-B5-His-Glu-Ala-Ala-Phe-Val-S8-Phe-Trp-Gln-NH2 | 134 |
| I-207 | Ac-PL3-Asp-Ala-B5-Asp-Glu-Ala-Ala-3MeF-Val-S8-Phe-Trp-Gln-NH2 | 135 |
| I-208 | Ac-PL3-Asp-Ala-B5-Asp-Glu-Ala-Ala-3MeF-Val-S8-Phe-Trp-Gln-NH2 | 135 |
| I-209 | Ac-PL3-Asp-Ala-B5-Asp-Glu-Ala-Ala-345FF-Val-S8-Phe-Trp-Gln-NH2 | 136 |
| I-210 | Ac-PL3-Asp-Ala-B5-Asp-Glu-Ala-Ala-345FF-Val-S8-Phe-Trp-Gln-NH2 | 136 |
| I-211 | Ac-PL3-Asp-Ala-B5-Asp-Glu-Ala-Ala-345FF-Val-S8-Phe-Trp-Gln-NH2 | 136 |
| I-212 | Ac-PL3-Asp-Ala-B5-Asp-Glu-Ala-Ala-345FF-Val-S8-Phe-Trp-Gln-NH2 | 136 |
| I-213 | Ac-PL3-Asp-Ala-B5-3pyrA-Glu-Ala-Ala-Phe-Val-S8-Phe-Trp-Gln-NH2 | 137 |
| I-214 | Ac-PL3-Asp-Ala-B5-4pyrA-Glu-Ala-Ala-Phe-Val-S8-Phe-Trp-Gln-NH2 | 138 |
| I-215 | Ac-PL3-Asp-Ala-B5-Asp-DaMeL-Ala-Ala-Phe-Val-S8-Phe-Trp-Gln-NH2 | 139 |
| I-216 | Ac-PL3-Asp-Ala-B5-Asp-DaMeL-Ala-Ala-Phe-Val-S8-Phe-Trp-Gln-NH2 | 139 |
| I-217 | Ac-PL3-Asp-Ala-B5-Asp-Glu-Ala-Ala-MeTyr-Val-S8-Phe-Trp-Gln-NH2 | 140 |
| I-218 | Ac-PL3-Asp-Ala-B5-Asp-Glu-Ala-Ala-MeTyr-Val-S8-Phe-Trp-Gln-NH2 | 140 |
| I-219 | Ac-PL3-Asp-Ala-B5-Asp-Glu-Ala-Ala-35FF-Val-S8-Phe-Trp-Gln-NH2 | 141 |
| I-220 | Ac-PL3-Asp-Ala-B5-Asp-Glu-Ala-Ala-35FF-Val-S8-Phe-Trp-Gln-NH2 | 141 |
| I-221 | Ac-Phe-Asp-Ala-R8-Asp-Asp-Ala-Ala-Phe-Thr-PyrS-Phe-Trp-Gln-NH2 | 142 |
| I-222 | Ac-Phe-Asp-Ala-R8-Asp-Asp-Ala-Ala-Phe-Thr-PyrS-Phe-Trp-Gln-NH2 | 142 |
| I-223 | Ac-Phe-Asp-Ala-R8-Asp-Asp-Ala-Ala-Phe-Thr-PyrS-Phe-Trp-Gln-NH2 | 142 |
| I-224 | Ac-Phe-Asp-Ala-R8-Asp-Asp-Ala-Ala-Phe-Thr-PyrS-Phe-Trp-Gln-NH2 | 142 |
| I-225 | Ac-Phe-Asp-Ala-R8-Asp-Asp-Ala-Ala-Phe-Val-PyrS-Pff-Trp-Gln-NH2 | 143 |
| I-226 | Ac-Phe-Asp-Ala-R8-Asp-Asp-Ala-Ala-Phe-Val-PyrS-Pff-Trp-Gln-NH2 | 143 |
| I-227 | Ac-Phe-Asp-Ala-R8-Asp-Asp-Ala-Ala-Phe-Val-PyrS-Pff-Trp-Gln-NH2 | 143 |
| I-228 | Ac-Phe-Asp-Ala-R8-Asp-Asp-Ala-Ala-Phe-Val-PyrS-Pff-Trp-Gln-NH2 | 143 |
| I-229 | Ac-PL3-Asp-Ala-B5-2pyrA-Glu-Ala-Ala-Phe-Val-S8-Phe-Trp-Gln-NH2 | 144 |
| I-230 | Ac-PL3-Asp-Ala-B5-2pyrA-Glu-Ala-Ala-Phe-Val-S8-Phe-Trp-Gln-NH2 | 144 |
| I-231 | Ac-PL3-Asp-Ala-B5-Asp-BztA-Ala-Ala-Phe-Val-S8-Phe-Trp-Gln-NH2 | 145 |
| I-232 | Ac-PL3-Asp-Ala-B5-Asp-2NapA-Ala-Ala-Phe-Val-S8-Phe-Trp-Gln-NH2 | 146 |
| I-233 | Ac-PL3-Asp-Ala-B5-Asp-Trp-Ala-Ala-Phe-Val-S8-Phe-Trp-Gln-NH2 | 147 |
| I-234 | Ac-PL3-Asp-Ala-B5-Asp-1NapA-Ala-Ala-Phe-Val-S8-Phe-Trp-Gln-NH2 | 148 |
| I-235 | Ac-PL3-Asp-Ala-B5-Asp-Bip-Ala-Ala-Phe-Val-S8-Phe-Trp-Gln-NH2 | 149 |
| I-236 | Ac-PL3-Asp-Ala-B5-Asp-Asp-Ala-Ala-3F3MeF-Val-S8-Phe-Trp-Gln-NH2 | 150 |
| I-237 | Ac-PL3-Asp-Ala-B5-Asp-Asp-Ala-Ala-3F3MeF-Val-S8-Phe-Trp-Gln-NH2 | 150 |
| I-238 | Ac-PL3-Asp-Ala-B5-Asp-Asp-Ala-Ala-3F3MeF-Val-S8-Phe-Trp-Gln-NH2 | 150 |
| I-239 | Ac-PL3-Asp-Ala-B5-Asp-Asp-Ala-Ala-3F3MeF-Val-S8-Phe-Trp-Gln-NH2 | 150 |
| I-240 | Ac-PL3-Asp-Ala-B5-Asp-Asp-Ala-Ala-4F3MeF-Val-S8-Phe-Trp-Gln-NH2 | 151 |
| I-241 | Ac-PL3-Asp-Ala-B5-Asp-Asp-Ala-Ala-4F3MeF-Val-S8-Phe-Trp-Gln-NH2 | 151 |
| I-242 | Ac-PL3-Asp-Ala-B5-Asp-Asp-Ala-Ala-4F3MeF-Val-S8-Phe-Trp-Gln-NH2 | 151 |
| I-243 | Ac-PL3-Asp-Ala-B5-Asp-Asp-Ala-Ala-4F3MeF-Val-S8-Phe-Trp-Gln-NH2 | 151 |
| I-244 | Ac-PL3-Asp-Ala-B5-Asp-3F3MeF-Ala-Ala-Phe-Val-S8-Phe-Trp-Gln-NH2 | 152 |
| I-245 | Ac-PL3-Asp-Ala-B5-Asp-3F3MeF-Ala-Ala-Phe-Val-S8-Phe-Trp-Gln-NH2 | 152 |
| I-246 | Ac-PL3-Asp-Ala-B5-Asp-4F3MeF-Ala-Ala-Phe-Val-S8-Phe-Trp-Gln-NH2 | 153 |
| I-247 | Ac-PL3-Asp-Ala-B5-Asp-4F3MeF-Ala-Ala-Phe-Val-S8-Phe-Trp-Gln-NH2 | 153 |
| I-248 | Ac-PL3-Asp-Ala-B5-Asp-Asp-Ala-Ala-Phe-Val-S8-3F3MeF-Trp-Gln-NH2 | 154 |
| I-249 | Ac-PL3-Asp-Ala-B5-Asp-Asp-Ala-Ala-Phe-Val-S8-3F3MeF-Trp-Gln-NH2 | 154 |
| I-250 | Ac-PL3-Asp-Ala-B5-Asp-Asp-Ala-Ala-Phe-Val-S8-3F3MeF-Trp-Gln-NH2 | 154 |
| I-251 | Ac-PL3-Asp-Ala-B5-Asp-Asp-Ala-Ala-Phe-Val-S8-3F3MeF-Trp-Gln-NH2 | 154 |
| I-252 | Ac-PL3-Asp-Ala-B5-Asp-Asp-Ala-Ala-Phe-Val-S8-4F3MeF-Trp-Gln-NH2 | 155 |
| I-253 | Ac-PL3-Asp-Ala-B5-Asp-Asp-Ala-Ala-Phe-Val-S8-4F3MeF-Trp-Gln-NH2 | 155 |
| I-254 | Ac-PL3-Asp-Ala-B5-Asp-Asp-Ala-Ala-Phe-Val-S8-4F3MeF-Trp-Gln-NH2 | 155 |
| I-255 | Ac-PL3-Asp-Ala-B5-Asp-Asp-Ala-Ala-Phe-Val-S8-4F3MeF-Trp-Gln-NH2 | 155 |
| I-256 | Ac-PL3-Asp-Ala-B5-Asp-6F1NapA-Ala-Ala-Phe-Val-S8-Phe-Trp-Gln-NH2 | 156 |
| I-257 | Ac-PL3-Asp-Ala-B5-Asp-3FF-Ala-Ala-Phe-Val-S8-Phe-Trp-Gln-NH2 | 157 |
| I-258 | Ac-PL3-Asp-Ala-B5-Asp-4FF-Ala-Ala-Phe-Val-S8-Phe-Trp-Gln-NH2 | 158 |
| I-259 | Ac-PL3-Asp-Ala-B5-Asp-34FF-Ala-Ala-Phe-Val-S8-Phe-Trp-Gln-NH2 | 159 |
| I-260 | Ac-PL3-Asp-Ala-B5-Asp-Asp-Ala-Ala-Phe-Val-S8-3FF-Trp-Gln-NH2 | 160 |
| I-261 | Ac-PL3-Asp-Ala-B5-Asp-Asp-Ala-Ala-Phe-Val-S8-4FF-Trp-Gln-NH2 | 161 |
| I-262 | Ac-PL3-Asp-Ala-B5-Asp-Asp-Ala-Ala-Phe-Val-S8-34FF-Trp-Gln-NH2 | 162 |
| I-263 | Ac-PL3-Asp-Ala-B5-Asp-Asp-Ala-Ala-Phe-Val-S8-34FF-Trp-Gln-NH2 | 162 |
| I-264 | Ac-PL3-Asp-Ala-B5-Asp-Asp-Ala-Ala-3FF-Val-S8-Phe-Trp-Gln-NH2 | 163 |
| I-265 | Ac-PL3-Asp-Ala-B5-Asp-Asp-Ala-Ala-3FF-Val-S8-Phe-Trp-Gln-NH2 | 163 |
| I-266 | Ac-PL3-Asp-Ala-B5-Asp-Asp-Ala-Ala-4FF-Val-S8-Phe-Trp-Gln-NH2 | 164 |
| I-267 | Ac-PL3-Asp-Ala-B5-Asp-Asp-Ala-Ala-34FF-Val-S8-Phe-Trp-Gln-NH2 | 165 |
| I-268 | Ac-PL3-Asp-Ala-B5-Asp-Asp-Ala-Ala-Phe-Val-S8-hPhe-Trp-Gln-NH2 | 166 |
| I-269 | Ac-PL3-Asp-Ala-B5-Asp-Asp-Ala-Ala-Phe-Val-S8-hTyr-Trp-Gln-NH2 | 167 |
| I-270 | Ac-PL3-Asp-Ala-B5-Asp-2PyrA-Ala-Ala-Phe-Val-S8-Phe-Trp-Gln-NH2 | 168 |
| I-271 | Ac-PL3-Asp-Ala-B5-Asp-3PyrA-Ala-Ala-Phe-Val-S8-Phe-Trp-Gln-NH2 | 169 |
| I-272 | Ac-PL3-Asp-Ala-B5-Asp-4PyrA-Ala-Ala-Phe-Val-S8-Phe-Trp-Gln-NH2 | 170 |
| I-273 | Ac-PL3-Asp-Ala-B5-Asp-hTyr-Ala-Ala-Phe-Val-S8-Phe-Trp-Gln-NH2 | 171 |
| I-274 | Ac-PL3-Asp-Ala-B5-Asp-Tyr-Ala-Ala-Phe-Val-S8-Phe-Trp-Gln-NH2 | 172 |
| I-275 | Ac-PL3-Asp-Ala-B5-Asp-Asp-Ala-Ala-Phe-Val-S8-1NapA-Trp-Gln-NH2 | 173 |
| I-276 | Ac-PL3-Asp-Ala-B5-Asp-Asp-Ala-Ala-Phe-Val-S8-1NapA-Trp-Gln-NH2 | 173 |
| I-277 | Ac-PL3-Asp-Ala-B5-Asp-Asp-Ala-Ala-Phe-Val-S8-2NapA-Trp-Gln-NH2 | 174 |
| I-278 | Ac-PL3-Asp-Ala-B5-Asp-Asp-Ala-Ala-Phe-Val-S8-2NapA-Trp-Gln-NH2 | 174 |
| I-279 | Ac-PL3-Glu-Ala-B5-Asp-Asp-Ala-Ala-Phe-Val-S8-Phe-Trp-Gln-NH2 | 175 |
| I-280 | Ac-PL3-Glu-Ala-B5-Asp-Asp-Ala-Ala-Phe-Val-S8-Phe-Trp-Gln-NH2 | 175 |
| I-281 | Ac-PL3-Asp-Ala-B5-Glu-Asp-Ala-Ala-Phe-Val-S8-Phe-Trp-Gln-NH2 | 176 |
| I-282 | Ac-PL3-Asp-Ala-B5-Glu-Asp-Ala-Ala-Phe-Val-S8-Phe-Trp-Gln-NH2 | 176 |
| I-283 | Ac-PL3-Asp-Ala-B5-Asp-Asp-Ala-Ala-Phe-Val-S8-Asp-Trp-Gln-NH2 | 177 |
| I-284 | Ac-PL3-Asp-Ala-B5-Asp-Asp-Ala-Ala-Phe-Val-S8-Asn-Trp-Gln-NH2 | 178 |
| I-285 | Ac-PL3-Asp-Ala-B5-Asp-Asp-Ala-Ala-Phe-Val-S8-His-Trp-Gln-NH2 | 179 |
| I-286 | Ac-PL3-Asp-Ala-B5-Asp-Asp-Ala-Ala-Phe-Ala-S8-Phe-Trp-Ala-NH2 | 180 |
| I-287 | Ac-PL3-Asp-Ala-B5-Asp-Asp-Ala-Ala-Phe-Ala-S8-Phe-Trp-Gln-NH2 | 181 |
| I-288 | Ac-PL3-Asp-Ala-B5-Asp-Asp-Ala-Ala-Phe-Ala-S8-Phe-Trp-Gln-NH2 | 181 |
| I-289 | Ac-PL3-Asp-Ala-B5-Asp-Asp-Ala-Ala-Phe-Val-S8-Phe-Trp-NH2 | 182 |
| I-290 | Ac-PL3-Asp-Ala-B5-Asp-Asp-Ala-Ala-Phe-Val-S8-Phe-Trp-NH2 | 182 |
| I-291 | Ac-PL3-Asp-Ala-B5-Asp-Asp-Ala-Ala-Phe-Val-S8-Phe-Trp-Ala-NH2 | 183 |
| I-292 | Ac-PL3-Asp-Ala-B5-Asp-Asp-Ala-Ala-Phe-Val-S8-Phe-Trp-Ala-NH2 | 183 |
| I-293 | Ac-PL3-Asp-Ala-B5-Asp-TfeGA-Ala-Ala-Phe-Val-S8-Phe-BztA-Gln-NH2 | 184 |
| I-294 | Ac-PL3-Asp-Ala-B5-Asp-Asp-Ala-Ala-Phe-Gln-S8-Phe-BztA-Gln-NH2 | 185 |
| I-295 | Ac-PL3-Asp-Ala-B5-Asp-2NapA-Ala-Ala-Phe-Gln-S8-Phe-BztA-Gln-NH2 | 186 |
| I-296 | Ac-PL3-Asp-Ala-B5-Asp-2NapA-Ala-Ala-Phe-Gln-S8-Phe-BztA-Ala-NH2 | 187 |
| I-297 | Ac-PL3-Asp-Ala-B5-Asp-2NapA-Ala-Ala-Phe-Val-S8-Phe-BztA-Gln-NH2 | 188 |
| I-298 | Ac-PL3-Asp-Ala-B5-Asp-2NapA-Ala-Ala-Phe-Ser-S8-Phe-BztA-Gln-NH2 | 189 |
| I-299 | Ac-PL3-Asp-Hse-B5-Asp-Asp-Ala-Ala-Phe-Gln-S8-Phe-BztA-Ala-NH2 | 190 |
| I-300 | Ac-PL3-Asp-Ala-B5-Asp-Qui-Ala-Ala-Phe-Val-S8-Phe-BztA-Gln-NH2 | 191 |
| I-301 | Ac-PL3-Asp-Ala-B5-Asp-hPhe-Ala-Ala-Phe-Val-S8-Phe-BztA-Gln-NH2 | 192 |
| I-302 | Ac-PL3-Asp-Ala-B5-Asp-Asp-Ala-Ala-Phe-Val-S8-pff-BztA-Gln-NH2 | 193 |
| I-303 | Ac-PL3-Asp-Ala-B5-Asp-DipA-Ala-Ala-Phe-Val-S8-Phe-Trp-Gln-NH2 | 194 |
| I-304 | Ac-PL3-Asp-Ala-B5-Asp-His-Ala-Ala-Phe-Val-S8-Phe-Trp-Gln-NH2 | 195 |
| I-305 | Ac-PL3-Asp-Ala-B5-Asp-His-Ala-Ala-Phe-Val-S8-Phe-Trp-Gln-NH2 | 195 |
| I-306 | Ac-PL3-Asp-Ala-B5-Asp-Asp-Ala-Ala-3C1F-Val-S8-Phe-Trp-Gln-NH2 | 196 |
| I-307 | Ac-PL3-Asp-Ala-B5-Asp-Asp-Ala-Ala-3C1F-Val-S8-Phe-Trp-Gln-NH2 | 196 |
| I-308 | Ac-PL3-Asp-Ala-B5-Asp-Asp-Ala-Ala-4C1F-Val-S8-Phe-Trp-Gln-NH2 | 197 |
| I-309 | Ac-PL3-Asp-Ala-B5-Asp-Asp-Ala-Ala-4C1F-Val-S8-Phe-Trp-Gln-NH2 | 197 |
| I-310 | Ac-PL3-Asp-Ala-B5-Asp-Asp-Ala-Ala-Phe-Val-S8-3C1F-Trp-Gln-NH2 | 198 |
| I-311 | Ac-PL3-Asp-Ala-B5-Asp-Asp-Ala-Ala-Phe-Val-S8-3C1F-Trp-Gln-NH2 | 198 |
| I-312 | Ac-PL3-Asp-Ala-B5-Asp-Asp-Ala-Ala-Phe-Val-S8-4C1F-Trp-Gln-NH2 | 199 |
| I-313 | Ac-PL3-Asp-Ala-B5-Asp-Asp-Ala-Ala-Phe-Val-S8-4C1F-Trp-Gln-NH2 | 199 |
| I-314 | Ac-PL3-His-Ala-B5-Asp-Glu-Ala-Ala-Phe-Val-S8-Phe-Trp-Gln-NH2 | 200 |
| I-315 | Ac-PL3-His-Ala-B5-Asp-Glu-Ala-Ala-Phe-Val-S8-Phe-Trp-Gln-NH2 | 200 |
| I-316 | Ac-PL3-Asp-Ala-B5-Asp-Asp-Ala-Ala-Phe-Gln-S8-Phe-Trp-Ala-NH2 | 201 |
| I-317 | Ac-PL3-Asp-Ala-B5-Asp-Asp-Ala-Ala-2FF-Val-S8-Phe-Trp-Gln-NH2 | 202 |
| I-318 | Ac-PL3-Asp-Ala-B5-Asp-Asp-Ala-Ala-Phe-Val-S8-2FF-Trp-Gln-NH2 | 203 |
| I-319 | Ac-PL3-Asp-Ala-B5-Asp-Asp-Ala-Ala-Phe-Val-S8-2FF-Trp-Gln-NH2 | 203 |
| I-320 | Ac-PL3-Asp-Ala-B5-Asp-Asp-Ala-Ala-His-Val-S8-Phe-Trp-Gln-NH2 | 204 |
| I-321 | Ac-PL3-Asp-Ala-B5-Asp-Asp-Ala-Ala-His-Val-S8-Phe-Trp-Gln-NH2 | 204 |
| I-322 | Ac-PL3-Asp-Ala-B5-Asp-Asp-Ala-Ala-4AmPhe-Val-S8-Phe-Trp-Gln-NH2 | 205 |
| I-323 | Ac-PL3-Asp-Ala-B5-Asp-Asp-Ala-Ala-4AmPhe-Val-S8-Phe-Trp-Gln-NH2 | 205 |
| I-324 | Ac-PL3-Asp-Ala-B5-Asp-4AmPhe-Ala-Ala-Phe-Val-S8-Phe-Trp-Gln-NH2 | 206 |
| I-325 | Ac-PL3-Asp-Ala-B5-Asp-Asp-Ala-Ala-2Thi-Val-S8-Phe-Trp-Gln-NH2 | 207 |
| I-326 | Ac-PL3-Asp-Ala-B5-Asp-Asp-Ala-Ala-3Thi-Val-S8-Phe-Trp-Gln-NH2 | 208 |
| I-327 | Ac-PL3-Asp-Ala-B5-Asp-Asp-Ala-Ala-2FurA-Val-S8-Phe-Trp-Gln-NH2 | 209 |
| I-328 | Ac-PL3-Asp-Ala-B5-Asp-Asp-Ala-Ala-2FurA-Val-S8-Phe-Trp-Gln-NH2 | 209 |
| I-329 | Ac-PL3-Asp-Ala-B5-Asp-Asp-Ala-Ala-1meH-Val-S8-Phe-Trp-Gln-NH2 | 210 |
| I-330 | Ac-PL3-Asp-Ala-B5-Asp-Asp-Ala-Ala-1meH-Val-S8-Phe-Trp-Gln-NH2 | 210 |
| I-331 | Ac-PL3-Asp-Ala-B5-Asp-Asp-Ala-Ala-3meH-Val-S8-Phe-Trp-Gln-NH2 | 211 |
| I-332 | Ac-PL3-Asp-Ala-B5-Asp-Asp-Ala-Ala-3meH-Val-S8-Phe-Trp-Gln-NH2 | 211 |
| I-333 | Ac-PL3-Asp-Ala-B5-Asp-Asp-Ala-Ala-Phe-Ser-S8-Phe-WCHO-Ser-NH2 | 212 |
| I-334 | Ac-PL3-Asp-Ala-B5-Asp-Asp-Ala-Ala-Phe-Val-S8-Phe-WCHO-Ser-NH2 | 213 |
| I-335 | Ac-PL3-Asp-Ala-B5-Asp-Asp-Ala-Ala-Phe-Val-S8-Phe-WCHO-Ser-NH2 | 213 |
| I-336 | Ac-PL3-Asp-Ala-B5-Asp-Asp-Ala-Ala-Phe-Val-S8-2CBMF-BztA-Gln-NH2 | 214 |
| I-337 | Ac-PL3-Asp-Ala-B5-Asp-Asp-Ala-Ala-Phe-Val-S8-4CBMF-BztA-Gln-NH2 | 215 |
| I-338 | Ac-PL3-Asp-Ala-B5-Asp-Asp-Ala-Ala-Phe-Val-S8-4CBMF-BztA-Gln-NH2 | 215 |
| I-339 | Ac-PL3-Asp-Ala-B5-Asp-Asp-Ala-Ala-Phe-Val-S8-4COOHF-BztA-Gln-NH2 | 216 |
| I-340 | Ac-PL3-Asp-Ala-B5-Asp-Asp-Ala-Ala-Phe-Val-S8-4COOHF-BztA-Gln-NH2 | 216 |
| I-341 | Ac-PL3-Asp-Ala-B5-Asp-Asp-Ala-Ala-Phe-Val-S8-Tyr-BztA-Gln-NH2 | 217 |
| I-342 | Ac-PL3-Asp-Ala-B5-Asp-Asp-Ala-Ala-Phe-Thr-S8-Phe-BztA-Gln-NH2 | 218 |
| I-343 | Ac-PL3-Asp-Ala-B5-Asp-Asp-Ala-Ala-Phe-Asn-S8-Phe-BztA-Gln-NH2 | 219 |
| I-344 | Ac-PL3-Asp-Ala-B5-Asp-Asp-Ala-Ala-Phe-Asn-S8-Phe-BztA-Gln-NH2 | 219 |
| I-345 | Ac-PL3-Asp-S(OMe)-B5-Asp-Asp-Ala-Ala-Phe-Val-S8-Phe-BztA-Gln-NH2 | 220 |
| I-346 | Ac-PL3-Asp-Gln-B5-Asp-Asp-Ala-Ala-Phe-Val-S8-Phe-BztA-Gln-NH2 | 221 |
| I-347 | Ac-PL3-Asp-Gln-B5-Asp-Asp-Ala-Ala-Phe-Val-S8-Phe-BztA-Gln-NH2 | 221 |
| I-348 | Ac-PL3-Ala-Ala-B5-Asp-Asp-Ala-Ala-Phe-Val-S8-Phe-Trp-Gln-NH2 | 222 |
| I-349 | Ac-PL3-Ala-Ala-B5-Asp-Asp-Ala-Ala-Phe-Val-S8-Phe-Trp-Gln-NH2 | 222 |
| I-350 | Ac-PL3-Asp-Ala-B5-Ala-Asp-Ala-Ala-Phe-Val-S8-Phe-Trp-Gln-NH2 | 223 |
| I-351 | Ac-PL3-Asp-Ala-B5-Ala-Asp-Ala-Ala-Phe-Val-S8-Phe-Trp-Gln-NH2 | 223 |
| I-352 | Ac-PL3-Asp-Ala-B5-Asp-Ala-Ala-Ala-Phe-Val-S8-Phe-Trp-Gln-NH2 | 224 |
| I-353 | Ac-PL3-Asp-Ala-B5-Asp-Asp-Ala-Ala-Ala-Val-S8-Phe-Trp-Gln-NH2 | 225 |
| I-354 | Ac-PL3-Asp-Ala-B5-Asp-Asp-Ala-Ala-Ala-Val-S8-Phe-Trp-Gln-NH2 | 225 |
| I-355 | Ac-PL3-Asp-Ala-B5-Asp-Asp-Ala-Ala-Phe-Val-S8-Ala-Trp-Gln-NH2 | 226 |
| I-356 | Ac-PL3-Asp-Ala-B5-Asp-Asp-Ala-Ala-Phe-Val-S8-Ala-Trp-Gln-NH2 | 226 |
| I-357 | Ac-PL3-Asp-Ala-B5-Asp-Asp-Ala-Ala-Phe-Val-S8-Phe-Ala-Gln-NH2 | 227 |
| I-358 | Ac-PL3-Asp-Ala-B5-Asp-Asp-Ala-Ala-Phe-Val-S8-Phe-Ala-Gln-NH2 | 227 |
| I-359 | Ac-PL3-Asp-Ala-B5-Asp-Asp-Ala-Ala-Phe-Val-S8-4CNF-BztA-Gln-NH2 | 228 |
| I-360 | Ac-PL3-Asp-Ala-B5-Asp-Asp-Ala-Ala-Phe-Gln-S8-Phe-BztA-His-NH2 | 229 |
| I-361 | Ac-PL3-Asp-Ala-B5-Asp-Asp-Ala-Ala-Phe-Gln-S8-Phe-BztA-His-NH2 | 229 |
| I-362 | Ac-PL3-Asp-Ala-B5-Asp-Asp-Ala-Ala-Phe-Ala-S8-His-BztA-Gln-NH2 | 230 |
| I-363 | Ac-PL3-Asp-Ala-B5-Asp-Asp-Ala-Ala-His-Ala-S8-Phe-BztA-Gln-NH2 | 231 |
| I-364 | Ac-PL3-Asp-Ala-B5-Asp-Asp-Ala-Ala-His-Ala-S8-Phe-BztA-Gln-NH2 | 231 |
| I-365 | Ac-PL3-Asp-Ala-B5-Asp-Asp-Ala-Ala-2MeF-Ala-S8-Phe-BztA-Gln-NH2 | 232 |
| I-366 | Ac-PL3-Asp-Ala-B5-Asp-Asp-Ala-Ala-2MeF-Ala-S8-Phe-BztA-Gln-NH2 | 232 |
| I-367 | Ac-PL3-Asp-Ala-B5-Asp-Asp-Ala-Ala-Phe-Ala-S8-2MeF-BztA-Gln-NH2 | 233 |
| I-368 | Ac-PL3-Asp-Ala-B5-Asp-Asp-Ala-Ala-Phe-Val-S8-Phe-7F1NapA-Gln-NH2 | 234 |
| I-369 | Ac-PL3-Asp-Ala-B5-Asp-Asp-Ala-Ala-Phe-Ala-S8-4MeF-BztA-Gln-NH2 | 235 |
| I-370 | Ac-PL3-Asp-Ala-B5-Asp-Asp-Ala-Ala-2NapA-Ala-S8-Phe-BztA-Gln-NH2 | 236 |
| I-371 | Ac-PL3-Asp-Ala-B5-Asp-Asp-Ala-Ala-Phe-Ala-S8-3FF-BztA-Gln-NH2 | 237 |
| I-372 | Ac-PL3-Asp-Ala-B5-Asp-Glu-Ala-Ala-Phe-Ala-S8-3FF-BztA-Gln-NH2 | 238 |
| I-373 | Ac-PL3-Asp-Ala-B5-Asp-Asp-Ala-Ala-3F3MeF-Val-S8-Phe-BztA-Gln-NH2 | 239 |
| I-374 | Ac-PL3-Asp-Ala-B5-Asp-Asp-Ala-Ala-3F3MeF-Ala-S8-Phe-BztA-Gln-NH2 | 240 |
| I-375 | Ac-PL3-Asp-Ala-B5-Asp-Asp-Ala-Ala-3F3MeF-Ala-S8-Phe-BztA-Gln-NH2 | 240 |
| I-376 | Ac-PL3-Asp-Ala-B5-Asp-Asp-Ala-Ala-3F3MeF-Ala-S8-Phe-BztA-Gln-NH2 | 240 |
| I-377 | Ac-PL3-Asp-Ala-B5-Asp-Asp-Ala-Ala-3F3MeF-Ala-S8-Phe-BztA-Gln-NH2 | 240 |
| I-378 | Ac-PL3-Asp-Ala-B5-Asp-Asp-Ala-Ala-3F3MeF-Gln-S8-Phe-BztA-Gln-NH2 | 241 |
| I-379 | Ac-PL3-Asp-Ala-B5-Asp-Asp-Ala-Ala-3F3MeF-Gln-S8-Phe-BztA-Gln-NH2 | 241 |
| I-380 | Ac-PL3-Asp-Ala-B5-Asp-Asp-Ala-Ala-3F3MeF-Gln-S8-Phe-BztA-Gln-NH2 | 241 |
| I-381 | Ac-PL3-Asp-Ala-B5-Asp-Asn-Ala-Ala-Phe-Val-S8-3FF-BztA-Gln-NH2 | 242 |
| I-382 | Ac-PL3-Asp-Ala-B5-Asp-Asn-Ala-Ala-Phe-Val-S8-3FF-BztA-Gln-NH2 | 242 |
| I-383 | Ac-PL3-Asp-Ala-B5-Asp-Glu-Ala-Ala-Phe-Val-S8-2pyrA-BztA-Gln-NH2 | 243 |
| I-384 | Ac-PL3-Asp-Ala-B5-Asp-Glu-Ala-Ala-Phe-Val-S8-2pyrA-BztA-Gln-NH2 | 243 |
| I-385 | Ac-PL3-Asp-Ala-B5-Asp-Glu-Ala-Ala-Phe-Val-S8-4pyrA-BztA-Gln-NH2 | 244 |
| I-386 | Ac-PL3-Asp-Ala-B5-Asp-Glu-Ala-Ala-2pyrA-Val-S8-Phe-BztA-Gln-NH2 | 245 |
| I-387 | Ac-PL3-Asp-Ala-B5-Asp-Glu-Ala-Ala-2pyrA-Val-S8-Phe-BztA-Gln-NH2 | 245 |
| I-388 | Ac-PL3-Asp-Ala-B5-Asp-Glu-Ala-Ala-Phe-Val-S8-23FF-BztA-Gln-NH2 | 246 |
| I-389 | Ac-PL3-Asp-Ala-B5-Asp-Glu-Ala-Ala-Phe-Val-S8-23FF-BztA-Gln-NH2 | 246 |
| I-390 | Ac-PL3-Asp-Ala-B5-Asp-Glu-Ala-Ala-23FF-Val-S8-Phe-BztA-Gln-NH2 | 247 |
| I-391 | Ac-PL3-Asp-Ala-B5-Asp-Glu-Ala-Ala-23FF-Val-S8-Phe-BztA-Gln-NH2 | 247 |
| I-392 | Ac-PL3-Asp-Ala-B5-Asp-Glu-Ala-Ala-CypA-Val-S8-Phe-BztA-Gln-NH2 | 248 |
| I-393 | Ac-PL3-Asp-Ala-B5-Asp-Glu-Ala-Ala-Phe-Val-S8-CypA-BztA-Gln-NH2 | 249 |
| I-394 | Ac-PL3-Asp-Ala-B5-Asp-Glu-Ala-Ala-Phe-Val-S8-35FF-BztA-Gln-NH2 | 250 |
| I-395 | Ac-PL3-Asp-Ala-B5-Asp-Glu-Ala-Ala-Phe-Val-S8-3MeF-BztA-Gln-NH2 | 251 |
| I-396 | Ac-PL3-Asp-Ala-B5-Asp-His-Ala-Ala-Phe-Val-S8-3FF-BztA-Gln-NH2 | 252 |
| I-397 | Ac-PL3-Asp-Ala-B5-Asp-His-Ala-Ala-Phe-Val-S8-3FF-BztA-Gln-NH2 | 252 |
| I-398 | Ac-PL3-Asp-Ala-B5-Asp-His-Ala-Ala-Phe-Val-SeN-3FF-BztA-Gln-NH2 | 253 |
| I-399 | Ac-PL3-Asp-Ala-B5-Asp-His-Ala-Ala-Phe-Gln-S8-3FF-BztA-Gln-NH2 | 254 |
| I-400 | Ac-PL3-Asp-Ala-B5-Asp-His-Ala-Ala-Phe-Gln-SeN-3FF-BztA-Gln-NH2 | 255 |
| I-401 | Ac-PL3-Asp-Ala-B5-Asp-Glu-Ala-Ala-2Thi-Gln-S8-3FF-BztA-Gln-NH2 | 256 |
| I-402 | Ac-PL3-Asp-Ala-B5-Asp-2Thi-Ala-Ala-Phe-Val-S8-3FF-BztA-Gln-NH2 | 257 |
| I-403 | Ac-PL3-Asp-Ala-B5-Asp-1meH-Ala-Ala-Phe-Val-S8-3FF-BztA-Gln-NH2 | 258 |
| I-404 | Ac-PL3-Asp-Ala-B5-Asp-TfeGA-Ala-Ala-3MeF-Gln-S8-3FF-BztA-Gln-NH2 | 259 |
| I-405 | Ac-PL3-Asp-Ala-B5-Asp-TfeGA-Ala-Ala-3MeF-Gln-SeN-3FF-BztA-Gln-NH2 | 260 |
| I-406 | Ac-PL3-Asp-Ala-B5-Asp-Glu-Ala-Ala-Phe-Gln-S8-Phe-BztA-Gln-NH2 | 261 |
| I-407 | Ac-PL3-Asp-Ile-B5-Asp-Glu-Ala-Ala-Phe-Gln-S8-Phe-BztA-Gln-NH2 | 262 |
| I-408 | Ac-PL3-Asp-Ile-B5-Asp-Glu-Ala-Ala-Phe-Gln-S8-Phe-BztA-NH2 | 263 |
| I-409 | Ac-PL3-Asp-Ile-B5-Asp-Glu-Ala-Ala-Phe-Gln-S8-Phe-BztA-NH2 | 263 |
| I-410 | Ac-PL3-Asp-Val-B5-Asp-Glu-Ala-Ala-Phe-Gln-S8-Phe-BztA-Gln-NH2 | 264 |
| I-411 | Ac-PL3-Asp-nLeu-B5-Asp-Glu-Ala-Ala-Phe-Ala-S8-Phe-BztA-Gln-NH2 | 265 |
| I-412 | Ac-PL3-Asp-Ile-B5-Asp-Glu-Ala-Ala-2Thi-Gln-S8-3FF-BztA-Gln-NH2 | 266 |
| I-413 | Ac-PL3-Asp-Ala-B5-Asp-tetz-Ala-Ala-Phe-Gln-S8-Phe-BztA-Gln-NH2 | 267 |
| I-414 | Ac-PL3-Asp-Ala-B5-tetz-Glu-Ala-Ala-Phe-Gln-S8-Phe-BztA-Gln-NH2 | 268 |
| I-415 | Ac-PL3-Asp-Ala-B5-tetz-Glu-Ala-Ala-Phe-Gln-S8-Phe-BztA-Gln-NH2 | 268 |
| I-416 | Ac-PL3-tetz-Ala-B5-Asp-Glu-Ala-Ala-Phe-Gln-S8-Phe-BztA-Gln-NH2 | 269 |
| I-417 | Ac-PL3-tetz-Ala-B5-Asp-Glu-Ala-Ala-Phe-Gln-S8-Phe-BztA-Gln-NH2 | 269 |
| I-418 | Ac-PL3-Asp-Ala-B5-Asp-Glu-Ala-Ala-Phe-Gln-S8-Phe-BztA-His-NH2 | 270 |
| I-419 | Ac-PL3-Asp-Ala-B5-Asp-Glu-Ala-Ala-Phe-Gln-S8-Phe-BztA-His-NH2 | 270 |
| I-420 | Ac-PL3-Asp-Ala-B5-Asp-Glu-Ala-Ala-Phe-Thr-S8-Phe-BztA-His-NH2 | 271 |
| I-421 | Ac-PL3-Asp-Ala-B5-Asp-Glu-Ala-Ala-Phe-Asn-S8-Phe-BztA-His-NH2 | 272 |
| I-422 | Ac-PL3-Asp-Ala-B5-Asp-Glu-Ala-Ala-Phe-Asn-S8-Phe-BztA-His-NH2 | 272 |
| I-423 | Ac-PL3-Asp-Ala-B5-Asp-Glu-Ala-Ala-Phe-Thr-S8-Phe-BztA-Gln-NH2 | 273 |
| I-424 | Ac-PL3-Asp-Ala-B5-Asp-Glu-Ala-Ala-Phe-Asn-S8-Phe-BztA-Gln-NH2 | 274 |
| I-425 | Ac-PL3-Asp-Ala-B5-Asp-Glu-Ala-Ala-Phe-Asn-S8-Phe-BztA-Gln-NH2 | 274 |
| I-426 | Ac-PL3-Asp-Ala-B5-Asp-Glu-Ala-Ala-Phe-Gln-S8-3Thi-BztA-Gln-NH2 | 275 |
| I-427 | Ac-PL3-Asp-Ala-B5-Asp-Glu-Ala-Ala-Phe-Gln-S8-3Thi-BztA-Gln-NH2 | 275 |
| I-428 | Ac-PL3-Asp-Ala-B5-Asp-Glu-Ala-Ala-Phe-Gln-S8-2Thi-BztA-Gln-NH2 | 276 |
| I-429 | Ac-PL3-Asp-Ala-B5-Asp-Glu-Ala-Ala-3Thi-Gln-S8-3FF-BztA-Gln-NH2 | 277 |
| I-430 | Ac-PL3-Asp-Ala-B5-Asp-Glu-Ala-Ala-3Thi-Gln-S8-3FF-BztA-His-NH2 | 278 |
| I-431 | Ac-PL3-Asp-Ala-B5-Asp-Glu-Ala-Ala-3Thi-Gln-S8-3FF-BztA-NH2 | 279 |
| I-432 | Ac-PL3-Asp-Ala-B5-Asp-Glu-Ala-Ala-Phe-Asn-S8-Phe-BztA-NH2 | 280 |
| I-433 | Ac-PL3-Asp-Ala-B5-Asp-Glu-Ala-Ala-Phe-S(OMe)-S8-Phe-BztA-Gln-NH2 | 281 |
| I-434 | Ac-PL3-Asp-Ala-B5-Asp-Glu-Ala-Ala-Phe-Asn-S8-2FF-BztA-Gln-NH2 | 282 |
| I-435 | Ac-PL3-Asp-Ala-B5-Asp-Glu-Ala-Ala-Phe-Asn-S8-2C1F-BztA-Gln-NH2 | 283 |
| I-436 | Ac-PL3-Asp-Ala-B5-Asp-Glu-Ala-Ala-Phe-Asn-S8-2BrF-BztA-Gln-NH2 | 284 |
| I-437 | Ac-PL3-Asp-Ala-B5-Asp-Glu-Ala-Ala-Phe-Asn-S8-2OMeF-BztA-Gln-NH2 | 285 |
| I-438 | Ac-PL3-Asp-Ala-B5-Asp-Glu-Ala-Ala-Phe-Asn-S8-3meH-BztA-Gln-NH2 | 286 |
| I-439 | Ac-PL3-Asp-Ala-B5-Asp-Glu-Ala-Ala-Phe-Asn-S8-1meH-BztA-Gln-NH2 | 287 |
| I-440 | Ac-PL3-Asp-Ala-B5-Asp-Glu-Ala-Ala-Phe-Asn-S8-1meH-BztA-Gln-NH2 | 287 |
| I-441 | Ac-PL3-Asp-Ala-B5-Asp-Glu-Ala-Ala-Phe-Asn-S8-2NO2F-BztA-Gln-NH2 | 288 |
| I-442 | Ac-PL3-Asp-Ala-B5-Asp-Glu-Ala-Ala-Phe-Asn-S8-hPhe-BztA-Gln-NH2 | 289 |
| I-443 | Ac-PL3-Asp-Ala-B5-Asp-Glu-Ala-Ala-Phe-Asn-S8-hPhe-BztA-Gln-NH2 | 289 |
| I-444 | Ac-PL3-Asp-Ala-B5-Asp-Tetz-Ala-Ala-Phe-Asn-S8-Phe-BztA-Gln-NH2 | 290 |
| I-445 | Ac-PL3-Asp-Ala-B5-Tetz-Asp-Ala-Ala-Phe-Asn-S8-Phe-BztA-Gln-NH2 | 291 |
| I-446 | Ac-PL3-Asp-Ala-B5-Asp-Glu-Ala-Ala-2Thi-Asn-S8-Phe-BztA-Gln-NH2 | 292 |
| I-447 | Ac-PL3-Asp-Ala-B5-Asp-Glu-Ala-Ala-2Thi-Asn-S8-Phe-BztA-Gln-NH2 | 292 |
| I-448 | Ac-PL3-Asp-Ala-B5-Asp-Glu-Ala-Ala-3Thi-Asn-S8-Phe-BztA-Gln-NH2 | 293 |
| I-449 | Ac-PL3-Asp-Ala-B5-Asp-Glu-Ala-Ala-3Thi-Asn-S8-Phe-BztA-Gln-NH2 | 293 |
| I-450 | Ac-PL3-Asp-Ala-B5-Asp-Glu-Ala-Ala-2Thi-Gln-S8-3FF-Trp-Gln-NH2 | 294 |
| I-451 | Ac-PL3-Asp-Ala-B5-Asp-Glu-Ala-Ala-3Thi-Gln-S8-3FF-Trp-Gln-NH2 | 295 |
| I-452 | Ac-PL3-Asp-Ala-B5-Asp-Glu-Ala-Ala-3Thi-Gln-S8-3FF-Trp-Gln-NH2 | 295 |
| I-453 | Ac-PL3-Asp-Ala-B5-Asp-Glu-Ala-Ala-2FF-Asn-S8-Phe-BztA-Gln-NH2 | 296 |
| I-454 | Ac-PL3-Asp-Ala-B5-Asp-Glu-Ala-Ala-3FF-Asn-S8-Phe-BztA-Gln-NH2 | 297 |
| I-455 | Ac-PL3-Asp-Ala-B5-Asp-Glu-Ala-Ala-4FF-Asn-S8-Phe-BztA-Gln-NH2 | 298 |
| I-456 | Ac-PL3-Asp-Ala-B5-Asp-Glu-Ala-Ala-2MeF-Asn-S8-Phe-BztA-Gln-NH2 | 299 |
| I-457 | Ac-PL3-Asp-Ala-B5-Asp-Glu-Ala-Ala-2MeF-Asn-S8-Phe-BztA-Gln-NH2 | 299 |
| I-458 | Ac-PL3-Asp-Ala-B5-Asp-Glu-Ala-Ala-3MeF-Asn-S8-Phe-BztA-Gln-NH2 | 300 |
| I-459 | Ac-PL3-Asp-Ala-B5-Asp-Glu-Ala-Ala-4MeF-Asn-S8-Phe-BztA-Gln-NH2 | 301 |
| I-460 | Ac-PL3-Asp-Ala-B5-Asp-Glu-Ala-Ala-2FurA-Asn-S8-Phe-BztA-Gln-NH2 | 302 |
| I-461 | Ac-PL3-Asp-Ala-B5-Asp-Glu-Ala-Ala-4AmPhe-Asn-S8-Phe-BztA-Gln-NH2 | 303 |
| I-462 | Ac-PL3-Asp-Ala-B5-Asp-Glu-Ala-Ala-Phe-Asn-PyrS2-Phe-BztA-Gln-NH2 | 304 |
| I-463 | Ac-PL3-Asp-Ala-B5-Asp-Glu-Ala-Ala-Phe-Asn-PyrS3-Phe-BztA-Gln-NH2 | 305 |
| I-464 | Ac-PL3-Asp-Ala-B5-Asp-Glu-Ala-Ala-Phe-Asn-PyrS3-Phe-BztA-Gln-NH2 | 305 |
| I-465 | Ac-PL3-Asp-Ala-B5-Asp-Asp-Ala-Ala-Phe-Asn-S8-Phe-BztA-His-NH2 | 306 |
| I-466 | Ac-PL3-Asp-Ala-B5-Asp-Asp-Ala-Ala-Phe-Asn-S8-Phe-BztA-His-NH2 | 306 |
| I-467 | Ac-PL3-Asp-Ile-B5-Asp-Asp-Ala-Ala-Phe-Asn-S8-Phe-BztA-Gln-NH2 | 307 |
| I-468 | Ac-PL3-Asp-Ile-B5-Asp-Asp-Ala-Ala-Phe-Asn-S8-Phe-BztA-Gln-NH2 | 307 |
| I-469 | Ac-PL3-Asp-Ile-B5-Asp-Asp-Ala-Ala-Phe-Asn-S8-Phe-BztA-His-NH2 | 308 |
| I-470 | Ac-PL3-Asp-Ile-B5-Asp-Asp-Ala-Ala-Phe-Asn-S8-Phe-BztA-His-NH2 | 308 |
| I-471 | Ac-PL3-Asp-Ile-B5-Asp-Glu-Ala-Ala-Phe-Gln-S8-Phe-BztA-His-NH2 | 309 |
| I-472 | Ac-PL3-Asp-Ile-B5-Asp-Glu-Ala-Ala-Phe-Asn-S8-Phe-BztA-His-NH2 | 310 |
| I-473 | Ac-PL3-Asp-Abu-B5-Asp-Glu-Ala-Ala-Phe-Asn-S8-Phe-BztA-Gln-NH2 | 311 |
| I-474 | Ac-PL3-Asp-Abu-B5-Asp-Glu-Ala-Ala-Phe-Asn-S8-Phe-BztA-Gln-NH2 | 311 |
| I-475 | Ac-PL3-Asp-aIle-B5-Asp-Glu-Ala-Ala-Phe-Asn-S8-Phe-BztA-Gln-NH2 | 312 |
| I-476 | Ac-PL3-Asp-aIle-B5-Asp-Glu-Ala-Ala-Phe-Asn-S8-Phe-BztA-Gln-NH2 | 312 |
| I-477 | Ac-PL3-Asp-Thr-B5-Asp-Glu-Ala-Ala-Phe-Gln-S8-Phe-BztA-Gln-NH2 | 313 |
| I-478 | Ac-PL3-Asp-Ala-B5-Asp-Glu-Ala-Ala-Phe-Asn-S8-Phe-BztA-1MeH-NH2 | 314 |
| I-479 | Ac-PL3-Asp-Ala-B5-Asp-Glu-Ala-Ala-Phe-Asn-S8-Phe-BztA-1MeH-NH2 | 314 |
| I-480 | Ac-PL3-Asp-Ala-B5-Asp-Glu-Ala-Ala-Phe-Asn-S8-Phe-BztA-3MeH-NH2 | 315 |
| I-481 | Ac-PL3-Asp-Ala-B5-Asp-Glu-Ala-Ala-Phe-Asn-S8-Phe-BztA-3MeH-NH2 | 315 |
| I-482 | Ac-PL3-Asp-Ile-B5-Asp-Asp-Ala-Ala-Phe-Gln-S8-Phe-BztA-Dab-NH2 | 316 |
| I-483 | Ac-PL3-Asp-Ile-B5-Asp-Asp-Ala-Ala-Phe-Gln-S8-[Acryl]Dap-BztA-Gln-NH2 | 317 |
| I-484 | Ac-PL3-Asp-Ile-B5-Asp-Asp-Ala-Ala-Phe-Gln-S8-[Acryl]Dap-BztA-Gln-NH2 | 317 |
| I-485 | Ac-PL3-Asp-Ile-B5-Asp-Glu-Ala-Ala-2Thi-Gln-S8-Phe-BztA-Gln-NH2 | 318 |
| I-486 | Ac-PL3-Asp-Ala-B5-Asp-Glu-Ala-Ala-2Thi-Gln-S8-Phe-BztA-Gln-NH2 | 319 |
| I-487 | Ac-PL3-Asp-Ala-B5-Asp-Glu-Ala-Ala-2Thi-Gln-S8-Phe-BztA-Gln-NH2 | 319 |
| I-488 | Ac-PL3-Asp-Ile-B5-Asp-Glu-Ala-Ala-2Thi-Gln-S8-Phe-BztA-His-NH2 | 320 |
| I-489 | Ac-PL3-Asp-Ile-B5-Asp-Asp-Ala-Ala-2Thi-Gln-S8-Phe-BztA-His-NH2 | 321 |
| I-490 | Ac-PL3-Asp-Ala-B5-Asp-Glu-Ala-Ala-Phe-Gln-S8-Phe-BztA-2FurA-NH2 | 322 |
| I-491 | Ac-PL3-Asp-Ala-B5-Asp-Glu-Ala-Ala-Phe-Gln-S8-Phe-BztA-Hse-NH2 | 323 |
| I-492 | Ac-PL3-Asp-Ala-B5-Asp-Glu-Ala-Ala-Phe-Gln-S8-Phe-BztA-Hse-NH2 | 323 |
| I-493 | Ac-PL3-Asp-Ala-B5-Asp-Glu-Ala-Ala-Phe-Gln-S8-Phe-BztA-DSer-NH2 | 324 |
| I-494 | Ac-PL3-Asp-Ala-B5-Asp-Glu-Ala-Ala-Phe-Gln-S8-Phe-BztA-DGIn-NH2 | 325 |
| I-495 | Ac-PL3-Asp-Ile-B5-Asp-Glu-Ala-Ala-Phe-Gln-S8-Phe-BztA-Asn-NH2 | 326 |
| I-496 | Ac-PL3-Asp-Ala-B5-Hse-Glu-Ala-Ala-Phe-Gln-S8-Phe-BztA-Gln-NH2 | 327 |
| I-497 | Ac-PL3-Asp-Ala-B5-Hse-Glu-Ala-Ala-Phe-Gln-S8-Phe-BztA-Gln-NH2 | 327 |
| I-498 | Ac-PL3-Asp-Ala-B5-Hse-Glu-Ala-Ala-Phe-Gln-S8-Phe-BztA-Gln-NH2 | 327 |
| I-499 | Ac-PL3-Asp-Ala-B5-Asp-TfeGA-Ala-Ala-Phe-Gln-S8-Phe-BztA-His-NH2 | 328 |
| I-500 | Ac-PL3-Asp-Ile-B5-Asp-TfeGA-Ala-Ala-Phe-Gln-S8-Phe-BztA-His-NH2 | 329 |
| I-501 | Ac-PL3-Asp-F3CA-B5-Asp-Glu-Ala-Ala-Phe-Gln-S8-Phe-BztA-Gln-NH2 | 330 |
| I-502 | Ac-PL3-Asp-F3CA-B5-Asp-Glu-Ala-Ala-Phe-Gln-S8-Phe-BztA-Gln-NH2 | 330 |
| I-503 | Ac-PL3-Asp-HF2CA-B5-Asp-Glu-Ala-Ala-Phe-Gln-S8-Phe-BztA-Gln-NH2 | 331 |
| I-504 | Ac-PL3-Asp-F3CA-B5-Asp-Glu-Ala-Ala-Phe-Gln-S8-Phe-BztA-His-NH2 | 332 |
| I-505 | Ac-PL3-Asp-Leu-B5-Asp-Glu-Ala-Ala-Phe-Gln-S8-Phe-BztA-Gln-NH2 | 333 |
| I-506 | Ac-PL3-Asp-Leu-B5-Asp-Glu-Ala-Ala-Phe-Gln-S8-Phe-BztA-His-NH2 | 334 |
| I-507 | Ac-PL3-Asp-Ala-B5-Asp-Glu-Ala-Ala-Phe-Gln-S8-Phe-BztA-Thr-NH2 | 335 |
| I-508 | Ac-PL3-Asp-Ala-B5-Asp-Glu-Ala-Ala-Phe-Gln-S8-Phe-BztA-Thr-NH2 | 335 |
| I-509 | Ac-PL3-Asp-Ala-B5-Asp-Glu-Ala-Ala-Phe-Gln-S8-Phe-BztA-Abu-NH2 | 336 |
| I-510 | Ac-PL3-Asp-Ala-B5-Asp-Glu-Ala-Ala-Phe-Asn-S8-2OMeF-BztA-His-NH2 | 337 |
| I-511 | Ac-PL3-Asp-Ala-B5-Asp-Glu-Ala-Ala-Phe-Asn-S8-2OMeF-BztA-His-NH2 | 337 |
| I-512 | Ac-PL3-Asp-Ile-B5-Asp-Glu-Ala-Ala-Phe-Asn-S8-2OMeF-BztA-His-NH2 | 338 |
| I-513 | Ac-PL3-Asp-Ala-B5-Asp-Glu-Ala-Ala-Phe-Asn-S8-2CBMF-BztA-His-NH2 | 339 |
| I-514 | Ac-PL3-Asp-Ile-B5-Asp-Glu-Ala-Ala-Phe-Asn-S8-2CBMF-BztA-His-NH2 | 340 |
| I-515 | Ac-PL3-Asp-Ala-B5-Asp-Glu-Ala-Ala-Phe-Asn-S8-3Thi-BztA-His-NH2 | 341 |
| I-516 | Ac-PL3-Asp-Ala-B5-Asp-Glu-Ala-Ala-Phe-Asn-S8-3Thi-BztA-His-NH2 | 341 |
| I-517 | Ac-PL3-Asp-Ile-B5-Asp-Glu-Ala-Ala-Phe-Asn-S8-3Thi-BztA-His-NH2 | 342 |
| I-518 | Ac-PL3-Asp-Ala-B5-Asp-Glu-Ala-Ala-Phe-Asn-S8-3Thi-BztA-Gln-NH2 | 343 |
| I-519 | Ac-PL3-Asp-Ala-B5-Asp-Glu-Ala-Ala-Phe-Asn-S8-3Thi-BztA-Gln-NH2 | 343 |
| I-520 | Ac-PL3-Asp-Ile-B5-Asp-Glu-Ala-Ala-Phe-Asn-S8-3Thi-BztA-Gln-NH2 | 344 |
| I-521 | Ac-PL3-Asp-Ile-B5-Asp-Glu-Ala-Ala-Phe-Asn-S8-3Thi-BztA-Gln-NH2 | 344 |
| I-522 | Ac-PL3-Asp-Nva-B5-Asp-Glu-Ala-Ala-Phe-Gln-S8-Phe-BztA-Gln-NH2 | 345 |
| I-523 | Ac-PL3-Asp-Nva-B5-Asp-Glu-Ala-Ala-Phe-Gln-S8-Phe-BztA-Gln-NH2 | 345 |
| I-524 | Ac-PL3-Asp-Ala-B5-Asp-Glu-Ala-Ala-4Thz-Asn-S8-Phe-BztA-Gln-NH2 | 346 |
| I-525 | Ac-PL3-Asp-Ala-B5-Asp-Glu-Ala-Ala-Phe-Gln-S8-2OMeF-BztA-Gln-NH2 | 347 |
| I-526 | Ac-PL3-Asp-Ala-B5-Asp-Glu-Ala-Ala-Phe-Gln-S8-2OMeF-BztA-Gln-NH2 | 347 |
| I-527 | Ac-PL3-Asp-Ile-B5-Asp-Glu-Ala-Ala-Phe-Gln-S8-2OMeF-BztA-Gln-NH2 | 348 |
| I-528 | Ac-PL3-Asp-Ile-B5-Asp-Glu-Ala-Ala-Phe-Gln-S8-2OMeF-BztA-Gln-NH2 | 348 |
| I-529 | Ac-PL3-Asp-Ala-B5-[MeSO2]Dap-Glu-Ala-Ala-Phe-Asn-S8-Phe-BztA-Gln-NH2 | 349 |
| I-530 | Ac-PL3-Asp-Ala-B5-[MeSO2]Dap-Glu-Ala-Ala-Phe-Asn-S8-Phe-BztA-Gln-NH2 | 349 |
| I-531 | Ac-PL3-Asp-Ala-B5-[MeSO2]Dab-Glu-Ala-Ala-Phe-Asn-S8-Phe-BztA-Gln-NH2 | 350 |
| I-532 | Ac-PL3-Asp-Ala-B5-[MeSO2]Dab-Glu-Ala-Ala-Phe-Asn-S8-Phe-BztA-Gln-NH2 | 350 |
| I-533 | Ac-PL3-Asp-Ala-B5-Asp-[MeSO2]Dap-Ala-Ala-Phe-Asn-S8-Phe-BztA-Gln-NH2 | 351 |
| I-534 | Ac-PL3-[MeSO2]Dap-Ala-B5-Asp-Glu-Ala-Ala-Phe-Asn-S8-Phe-BztA-Gln-NH2 | 352 |
| I-535 | Ac-PL3-Asp-Ala-B5-[NHiPr]AsnR-Asp-Ala-Ala-Phe-Val-S8-Phe-BztA-Gln-NH2 | 353 |
| I-536 | Ac-PL3-Asp-Ala-B5-[NHEt]AsnR-Asp-Ala-Ala-Phe-Val-S8-Phe-BztA-Gln-NH2 | 354 |
| I-537 | Ac-PL3-Asp-Ala-B5-[NHnPr]AsnR-Asp-Ala-Ala-Phe-Val-S8-Phe-BztA-Gln-NH2 | 355 |
| I-538 | Ac-PL3-Asp-Ala-B5-[NHCyPr]AsnR-Asp-Ala-Ala-Phe-Val-S8-Phe-BztA-Gln-NH2 | 356 |
| I-539 | Ac-PL3-Asp-Ala-B5-[NHCyBu]AsnR-Asp-Ala-Ala-Phe-Val-S8-Phe-BztA-Gln-NH2 | 357 |
| I-540 | Ac-PL3-Asp-Ala-B5-[NHMe]AsnR-Asp-Ala-Ala-Phe-Val-S8-Phe-BztA-Gln-NH2 | 358 |
| I-541 | Ac-PL3-Asp-TOMe-B5-Asp-Glu-Ala-Ala-Phe-Gln-S8-Phe-BztA-Gln-NH2 | 359 |
| I-542 | Ac-PL3-Asp-TOMe-B5-Asp-Glu-Ala-Ala-Phe-Gln-S8-Phe-BztA-Gln-NH2 | 359 |
| I-543 | Ac-PL3-Asp-Leu-B5-Asp-Glu-Ala-Ala-Phe-Asn-S8-Phe-BztA-His-NH2 | 360 |
| I-544 | Ac-PL3-Asp-Npg-B5-Asp-Glu-Ala-Ala-Phe-Gln-S8-Phe-BztA-Gln-NH2 | 361 |
| I-545 | Ac-PL3-Asp-hLeu-B5-Asp-Glu-Ala-Ala-Phe-Gln-S8-Phe-BztA-Gln-NH2 | 362 |
| I-546 | Ac-PL3-Asp-Npg-B5-Asp-Asp-Ala-Ala-Phe-Asn-S8-Phe-BztA-Gln-NH2 | 363 |
| I-547 | Ac-PL3-Asp-hLeu-B5-Asp-Asp-Ala-Ala-Phe-Asn-S8-Phe-BztA-Gln-NH2 | 364 |
| I-548 | Ac-PL3-Asp-hLeu-B5-Asp-Asp-Ala-Ala-Phe-Asn-S8-Phe-BztA-Gln-NH2 | 364 |
| I-549 | Ac-PL3-Asp-Ile-B5-Asp-Asp-Ala-Ala-Phe-Asn-S8-2OMeF-BztA-Gln-NH2 | 365 |
| I-550 | Ac-PL3-Asp-Ile-B5-Asp-Asp-Ala-Ala-Phe-Asn-S8-2OMeF-BztA-Gln-NH2 | 365 |
| I-551 | Ac-PL3-Asp-Ile-B5-Asp-Asp-Ala-Ala-Phe-Asn-S8-3Thi-BztA-Gln-NH2 | 366 |
| I-552 | Ac-PL3-Asp-Ile-B5-Asp-Asp-Ala-Ala-Phe-Asn-S8-3Thi-BztA-Gln-NH2 | 366 |
| I-553 | Ac-PL3-Asp-Ile-B5-Asp-Asp-Ala-Ala-Phe-Asn-S8-2OMeF-BztA-His-NH2 | 367 |
| I-554 | Ac-PL3-Asp-Ile-B5-Asp-Asp-Ala-Ala-Phe-Asn-S8-2OMeF-BztA-His-NH2 | 367 |
| I-555 | Ac-PL3-Asp-Ile-B5-Asp-Asp-Ala-Ala-Phe-Asn-S8-3Thi-BztA-His-NH2 | 368 |
| I-556 | Ac-PL3-Asp-Ile-B5-Asp-Asp-Ala-Ala-Phe-Asn-S8-3Thi-BztA-His-NH2 | 368 |
| I-557 | Ac-PL3-Asp-Ile-B5-Asp-Glu-Ala-Ala-Phe-Asn-S8-Phe-BztA-Gln-NH2 | 369 |
| I-558 | Ac-PL3-Asp-Leu-B5-Asp-Asp-Ala-Ala-Phe-Gln-S8-Phe-BztA-Gln-NH2 | 370 |
| I-559 | Ac-PL3-Asp-Leu-B5-Asp-Asp-Ala-Ala-Phe-Gln-S8-Phe-BztA-Gln-NH2 | 370 |
| I-560 | Ac-PL3-Asp-Leu-B5-Asp-Asp-Ala-Ala-Phe-Gln-S8-Phe-BztA-His-NH2 | 371 |
| I-561 | Ac-PL3-Asp-Leu-B5-Asp-Asp-Ala-Ala-Phe-Gln-S8-Phe-BztA-His-NH2 | 371 |
| I-562 | Ac-PL3-Asp-Leu-B5-Asp-Asp-Ala-Ala-Phe-Asn-S8-Phe-BztA-Gln-NH2 | 372 |
| I-563 | Ac-PL3-Asp-Leu-B5-Asp-Asp-Ala-Ala-Phe-Asn-S8-Phe-BztA-Gln-NH2 | 372 |
| I-564 | Ac-PL3-Asp-Leu-B5-Asp-Asp-Ala-Ala-Phe-Asn-S8-Phe-BztA-His-NH2 | 373 |
| I-565 | Ac-PL3-Asp-Leu-B5-Asp-Asp-Ala-Ala-Phe-Asn-S8-Phe-BztA-His-NH2 | 373 |
| I-566 | Ac-PL3-Asp-Val-B5-Asp-Asp-Ala-Ala-Phe-Asn-S8-Phe-BztA-Gln-NH2 | 374 |
| I-567 | Ac-PL3-Asp-Val-B5-Asp-Asp-Ala-Ala-Phe-Asn-S8-Phe-BztA-Gln-NH2 | 374 |
| I-568 | Ac-PL3-Asp-Abu-B5-Asp-Glu-Ala-Ala-Phe-Gln-S8-Phe-BztA-Gln-NH2 | 375 |
| I-569 | Ac-PL3-Asp-Abu-B5-Asp-Glu-Ala-Ala-Phe-Gln-S8-Phe-BztA-Gln-NH2 | 375 |
| I-570 | Ac-PL3-Asp-Abu-B5-Asp-Glu-Ala-Ala-Phe-Gln-S8-Phe-BztA-His-NH2 | 376 |
| I-571 | Ac-PL3-Asp-Abu-B5-Asp-Glu-Ala-Ala-Phe-Gln-S8-Phe-BztA-His-NH2 | 376 |
| I-572 | Ac-PL3-Asp-Abu-B5-Asp-Asp-Ala-Ala-Phe-Asn-S8-Phe-BztA-Gln-NH2 | 377 |
| I-573 | Ac-PL3-Asp-Abu-B5-Asp-Asp-Ala-Ala-Phe-Asn-S8-Phe-BztA-Gln-NH2 | 377 |
| I-574 | Ac-PL3-Asp-Abu-B5-Asp-Asp-Ala-Ala-Phe-Asn-S8-Phe-BztA-His-NH2 | 378 |
| I-575 | Ac-PL3-Asp-Abu-B5-Asp-Asp-Ala-Ala-Phe-Asn-S8-Phe-BztA-His-NH2 | 378 |
| I-576 | Ac-PL3-Asp-Leu-B5-Asp-Glu-Ala-Ala-Phe-Asn-S8-Phe-BztA-Gln-NH2 | 379 |
| I-577 | Ac-PL3-Asp-Leu-B5-Asp-Glu-Ala-Ala-Phe-Asn-S8-Phe-BztA-Gln-NH2 | 379 |
| I-578 | Ac-PL3-Asp-Ala-B5-Asp-Asp-Ala-Ala-Phe-Gln-S8-Phe-BztA-Gln-NH2 | 185 |
| I-579 | Ac-Phe-Asp-Ala-R8-Asp-Asp-Ala-Ala-Phe-Gln-PyrS-Phe-Trp-Gln-NH2 | 380 |
| I-580 | Ac-PL3-Asp-Ile-B5-Asp-Asp-Ala-Ala-Phe-Gln-S8-Phe-BztA-His-NH2 | 381 |
| I-581 | Ac-PL3-Asp-Ile-B5-Asp-Asp-Ala-Ala-Phe-Gln-S8-Phe-BztA-His-NH2 | 381 |
| I-582 | Ac-PL3-Asp-Npg-B5-Asp-Asp-Ala-Ala-Phe-Asn-S8-Phe-BztA-His-NH2 | 382 |
| I-583 | Ac-PL3-Asp-hLeu-B5-Asp-Asp-Ala-Ala-Phe-Asn-S8-Phe-BztA-His-NH2 | 383 |
| I-584 | Ac-PL3-Asp-hLeu-B5-Asp-Asp-Ala-Ala-Phe-Asn-S8-Phe-BztA-His-NH2 | 383 |
| I-585 | Ac-PL3-Asp-Ile-B5-Asp-Glu-Ala-Ala-BztA-Gln-S8-Phe-Phe-Gln-NH2 | 384 |
| I-586 | Ac-PL3-Asp-Ile-B5-Asp-Glu-Ala-Ala-BztA-Gln-S8-Phe-Phe-Gln-NH2 | 384 |
| I-587 | Ac-PL3-Asp-Ile-B5-Phe-Glu-Ala-Ala-Phe-Gln-S8-Asp-BztA-Gln-NH2 | 385 |
| I-588 | Ac-PL3-Phe-Ile-B5-Asp-Glu-Ala-Ala-Asp-Gln-S8-Phe-BztA-Gln-NH2 | 386 |
| I-589 | Ac-PL3-Asp-[AzAc]Lys-B5-Asp-Glu-Ala-Ala-Phe-Gln-S8-Phe-BztA-Gln-NH2 | 387 |
| I-590 | Ac-PL3-Asp-[AzAc]Lys-B5-Asp-Glu-Ala-Ala-Phe-Gln-S8-Phe-BztA-Gln-NH2 | 387 |
| I-591 | Ac-PL3-Asp-Ile-B5-Asp-Glu-[AzAc]Lys-Ala-Phe-Gln-S8-Phe-BztA-Gln-NH2 | 388 |
| I-592 | Ac-PL3-Asp-Ile-B5-Asp-Glu-[AzAc]Lys-Ala-Phe-Gln-S8-Phe-BztA-Gln-NH2 | 388 |
| I-593 | Ac-PL3-Asp-Ile-B5-Asp-Glu-Ala-[AzAc]Lys-Phe-Gln-S8-Phe-BztA-Gln-NH2 | 389 |
| I-594 | Ac-PL3-Asp-Ile-B5-Asp-Glu-Ala-Ala-Phe-[AzAc]Lys-S8-Phe-BztA-Gln-NH2 | 390 |
| I-595 | Ac-PL3-Asp-Ile-B5-Asp-Glu-Ala-Ala-Phe-Gln-S8-Phe-BztA-[AzAc]Lys-NH2 | 391 |
| I-596 | Ac-PL3-Asp-Ile-B5-Asp-Glu-Ala-Ala-Phe-Gln-S8-Phe-BztA-Gln-[AzAc]Lys-NH2 | 392 |
| I-597 | Ac-PL3-Asp-Ile-B5-Asp-Glu-Ala-Ala-Phe-Gln-S8-Phe-BztA-Gln-[AzAc]Lys-NH2 | 392 |
| I-598 | Nic-PL3-Asp-Ile-B5-Asp-Glu-Ala-Ala-Phe-Gln-S8-Phe-BztA-Gln-NH2 | 393 |
| I-599 | Pic-PL3-Asp-Ile-B5-Asp-Glu-Ala-Ala-Phe-Gln-S8-Phe-BztA-Gln-NH2 | 394 |
| I-600 | Bnc-PL3-Asp-Ile-B5-Asp-Glu-Ala-Ala-Phe-Gln-S8-Phe-BztA-Gln-NH2 | 395 |
| I-601 | Bnc-PL3-Asp-Ile-B5-Asp-Glu-Ala-Ala-Phe-Gln-S8-Phe-BztA-Gln-NH2 | 395 |
| I-602 | 2PyPrpc-PL3-Asp-Ile-B5-Asp-Glu-Ala-Ala-Phe-Gln-S8-Phe-BztA-Gln-NH2 | 396 |
| I-603 | Ac-PL3-Asp-Ile-B5-Asp-Gln-Ala-Ala-Phe-Gln-S8-Phe-BztA-Gln-NH2 | 397 |
| I-604 | Ac-PL3-Asp-Ile-B5-Asp-Cit-Ala-Ala-Phe-Gln-S8-Phe-BztA-Gln-NH2 | 398 |
| I-605 | Ac-PL3-Asp-Ile-B5-Asp-Cit-Ala-Ala-Phe-Gln-S8-Phe-BztA-Gln-NH2 | 398 |
| I-606 | Ac-PL3-Asp-Ile-B5-Asp-4COOHF-Ala-Ala-Phe-Gln-S8-Phe-BztA-Gln-NH2 | 399 |
| I-607 | Ac-PL3-Asp-Ile-B5-Asp-4COOHF-Ala-Ala-Phe-Gln-S8-Phe-BztA-Gln-NH2 | 399 |
| I-608 | Ac-PL3-Asp-Ile-B5-Asp-EtGa-Ala-Ala-Phe-Gln-S8-Phe-BztA-Gln-NH2 | 400 |
| I-609 | Ac-PL3-Asp-Ile-B5-Asp-EtGa-Ala-Ala-Phe-Gln-S8-Phe-BztA-Gln-NH2 | 400 |
| I-610 | Ac-PL3-Asp-Ile-B5-Asp-TfeGA-Ala-Ala-Phe-Gln-S8-Phe-BztA-Gln-NH2 | 401 |
| I-611 | Ac-PL3-Asp-Ile-B5-Asp-TfeGA-Ala-Ala-Phe-Gln-S8-Phe-BztA-Gln-NH2 | 401 |
| I-612 | Ac-PL3-Asp-Ile-B5-Asp-Aad-Ala-Ala-Phe-Gln-S8-Phe-BztA-Gln-NH2 | 402 |
| I-613 | Ac-PL3-Asp-Ile-B5-Asp-Arg-Ala-Ala-Phe-Gln-S8-Phe-BztA-Gln-NH2 | 403 |
| I-614 | Ac-PL3-Asp-Ile-B5-Asp-Arg-Ala-Ala-Phe-Gln-S8-Phe-BztA-Gln-NH2 | 403 |
| I-615 | Ac-PL3-Asp-Cha-B5-Asp-Glu-Ala-Ala-Phe-Asn-S8-Phe-BztA-His-NH2 | 404 |
| I-616 | Ac-PL3-Asp-Leu-B5-Asp-Glu-Ala-Ala-Phe-Cit-S8-Phe-BztA-His-NH2 | 405 |
| I-617 | Ac-PL3-Asp-Leu-B5-Asp-Glu-Ala-Ala-Phe-Thr-S8-Phe-BztA-His-NH2 | 406 |
| I-618 | Ac-PL3-Asp-Leu-B5-Asp-Glu-Ala-Ala-Phe-Thr-S8-Phe-BztA-His-NH2 | 406 |
| I-619 | Ac-PL3-Asp-Cha-B5-Asp-Glu-Ala-Ala-Phe-Asn-S8-Phe-BztA-Gln-NH2 | 407 |
| I-620 | Ac-PL3-Asp-Cha-B5-Asp-Glu-Ala-Ala-Phe-Asn-S8-Phe-BztA-Gln-NH2 | 407 |
| I-621 | Ac-PL3-Asp-Leu-B5-Asp-Glu-Ala-Ala-Phe-Cit-S8-Phe-BztA-Gln-NH2 | 408 |
| I-622 | Ac-PL3-Asp-Leu-B5-Asp-Glu-Ala-Ala-Phe-Thr-S8-Phe-BztA-Gln-NH2 | 409 |
| I-623 | Ac-PL3-Asp-Leu-B5-Asp-Glu-Ala-Ala-Phe-Thr-S8-Phe-BztA-Gln-NH2 | 409 |
| I-624 | Ac-PL3-Asp-Leu-B5-Asp-Glu-Ala-Ala-Phe-Asn-S8-Phe-BztA-NH2 | 410 |
| I-625 | Ac-PL3-Asp-Leu-B5-Asp-Glu-Ala-Ala-Phe-Asn-S8-Phe-BztA-NH2 | 410 |
| I-626 | Ac-PL3-Asp-Cha-B5-Asp-Glu-Ala-Ala-Phe-Asn-S8-Phe-BztA-NH2 | 411 |
| I-627 | Ac-PL3-Asp-Cha-B5-Asp-Glu-Ala-Ala-Phe-Asn-S8-Phe-BztA-NH2 | 411 |
| I-628 | Ac-PL3-Asp-Leu-B5-Asp-Glu-Ala-Ala-Phe-Cit-S8-Phe-BztA-NH2 | 412 |
| I-629 | Ac-PL3-Asp-Leu-B5-Asp-Glu-Ala-Ala-Phe-Cit-S8-Phe-BztA-NH2 | 412 |
| I-630 | Ac-PL3-Asp-Ile-B5-[Tf]Dap-Glu-Ala-Ala-Phe-Gln-S8-Phe-BztA-Gln-NH2 | 413 |
| I-631 | Ac-PL3-Asp-Ile-B5-[Tf]Dap-Glu-Ala-Ala-Phe-Gln-S8-Phe-BztA-Gln-NH2 | 413 |
| I-632 | Ac-PL3-[Tf]Dap-Ile-B5-Asp-Glu-Ala-Ala-Phe-Gln-S8-Phe-BztA-Gln-NH2 | 414 |
| I-633 | Ac-PL3-Asp-Ile-B5-Asp-Glu-Ala-Ala-Phe-Gln-S8-Phe-BztA-Arg-NH2 | 415 |
| I-634 | Ac-PL3-Asp-Ile-B5-Asp-Glu-Ala-Ala-Phe-Gln-S8-Phe-BztA-Leu-NH2 | 416 |
| I-635 | Ac-PL3-Asp-Ile-B5-Asp-Glu-Ala-Ala-Phe-Gln-S8-Phe-BztA-Phe-NH2 | 417 |
| I-636 | Ac-PL3-Asp-Ile-B5-Asp-Glu-Ala-Ala-Phe-Gln-S8-Phe-BztA-Tyr-NH2 | 418 |
| I-637 | Ac-PL3-Asp-Ile-B5-Asp-Glu-Ala-Ala-Phe-Gln-S8-Phe-BztA-Pro-NH2 | 419 |
| I-638 | Ac-PL3-Asp-Ile-B5-Asp-Glu-Ala-Ala-Phe-Gln-S8-Phe-BztA-Pro-NH2 | 419 |
| I-639 | Ac-PL3-Asp-Ile-B5-Asp-Glu-Ala-Ala-Phe-Gln-S8-Phe-BztA-Ser-NH2 | 420 |
| I-640 | Ac-PL3-Asp-Ile-B5-Asp-Glu-Ala-Ala-Phe-Gln-S8-Phe-BztA-Ser-NH2 | 420 |
| I-641 | Ac-PL3-Asp-Ile-B5-Asp-Glu-Ala-Ala-Phe-Gln-S8-Phe-BztA-Thr-NH2 | 421 |
| I-642 | Ac-PL3-Asp-Ile-B5-Asp-Glu-Ala-Ala-Phe-Gln-S8-Phe-BztA-Thr-NH2 | 421 |
| I-643 | Ac-PL3-Asp-Ile-B5-Asp-Glu-Ala-Ala-Phe-Gln-S8-Phe-BztA-Trp-NH2 | 422 |
| I-644 | Ac-PL3-Asp-Ile-B5-Asp-Glu-Ala-Ala-Phe-Gln-S8-Phe-BztA-Trp-NH2 | 422 |
| I-645 | Ac-PL3-Asp-Ile-B5-Asp-Glu-Ala-Ala-Phe-Gln-S8-Phe-BztA-Val-NH2 | 423 |
| I-646 | Ac-PL3-Asp-Ile-B5-Asp-Glu-Ala-Ala-Phe-Gln-S8-Phe-BztA-Val-NH2 | 423 |
| I-647 | Ac-PL3-Asp-Ile-B5-Asp-Glu-Leu-Ala-Phe-Gln-S8-Phe-BztA-Gln-NH2 | 424 |
| I-648 | Ac-PL3-Asp-Ile-B5-Asp-Glu-Leu-Ala-Phe-Gln-S8-Phe-BztA-Gln-NH2 | 424 |
| I-649 | Ac-PL3-Asp-Ile-B5-Asp-Glu-Phe-Ala-Phe-Gln-S8-Phe-BztA-Gln-NH2 | 425 |
| I-650 | Ac-PL3-Asp-Ile-B5-Asp-Glu-Phe-Ala-Phe-Gln-S8-Phe-BztA-Gln-NH2 | 425 |
| I-651 | Ac-PL3-Asp-Ile-B5-Asp-Glu-Ser-Ala-Phe-Gln-S8-Phe-BztA-Gln-NH2 | 426 |
| I-652 | Ac-PL3-Asp-Ile-B5-Asp-Glu-Ser-Ala-Phe-Gln-S8-Phe-BztA-Gln-NH2 | 426 |
| I-653 | Ac-PL3-Asp-Ile-B5-Asp-Glu-Gln-Ala-Phe-Gln-S8-Phe-BztA-Gln-NH2 | 427 |
| I-654 | Ac-PL3-Asp-Ile-B5-Asp-Glu-Gln-Ala-Phe-Gln-S8-Phe-BztA-Gln-NH2 | 427 |
| I-655 | Ac-PL3-Asp-Ile-B5-Asp-Glu-Trp-Ala-Phe-Gln-S8-Phe-BztA-Gln-NH2 | 428 |
| I-656 | Ac-PL3-Asp-Ile-B5-Asp-Glu-nLeu-Ala-Phe-Gln-S8-Phe-BztA-Gln-NH2 | 429 |
| I-657 | Ac-PL3-Asp-Ile-B5-Asp-Glu-nLeu-Ala-Phe-Gln-S8-Phe-BztA-Gln-NH2 | 429 |
| I-658 | Ac-PL3-Asp-Ile-B5-Asp-Glu-Ala-Leu-Phe-Gln-S8-Phe-BztA-Gln-NH2 | 430 |
| I-659 | Ac-PL3-Asp-Ile-B5-Asp-Glu-Ala-Leu-Phe-Gln-S8-Phe-BztA-Gln-NH2 | 430 |
| I-660 | Ac-PL3-Asp-Ile-B5-Asp-Glu-Ala-Phe-Phe-Gln-S8-Phe-BztA-Gln-NH2 | 431 |
| I-661 | Ac-PL3-Asp-Ile-B5-Asp-Glu-Ala-Ser-Phe-Gln-S8-Phe-BztA-Gln-NH2 | 432 |
| I-662 | Ac-PL3-Asp-Ile-B5-Asp-Glu-Ala-Ser-Phe-Gln-S8-Phe-BztA-Gln-NH2 | 432 |
| I-663 | Ac-PL3-Asp-Ile-B5-Asp-Glu-Ala-Gln-Phe-Gln-S8-Phe-BztA-Gln-NH2 | 433 |
| I-664 | Ac-PL3-Asp-Ile-B5-Asp-Glu-Ala-Trp-Phe-Gln-S8-Phe-BztA-Gln-NH2 | 434 |
| I-665 | Ac-PL3-Asp-Ile-B5-Asp-Glu-Ala-Trp-Phe-Gln-S8-Phe-BztA-Gln-NH2 | 434 |
| I-666 | Ac-PL3-Asp-Ile-B5-Asp-Glu-Ala-nLeu-Phe-Gln-S8-Phe-BztA-Gln-NH2 | 435 |
| I-667 | Ac-PL3-Asp-Ile-B5-Asp-Glu-Ala-nLeu-Phe-Gln-S8-Phe-BztA-Gln-NH2 | 435 |
| I-668 | Ac-PL3-isoDAsp-Ile-B5-Asp-Glu-Ala-Ala-Phe-Gln-S8-Phe-BztA-Gln-NH2 | 436 |
| I-669 | Ac-PL3-isoDAsp-Ile-B5-Asp-Glu-Ala-Ala-Phe-Gln-S8-Phe-BztA-Gln-NH2 | 436 |
| I-670 | Ac-PL3-RbGlu-Ile-B5-Asp-Glu-Ala-Ala-Phe-Gln-S8-Phe-BztA-Gln-NH2 | 437 |
| I-671 | Ac-PL3-RbGlu-Ile-B5-Asp-Glu-Ala-Ala-Phe-Gln-S8-Phe-BztA-Gln-NH2 | 437 |
| I-672 | Ac-PL3-SbGlu-Ile-B5-Asp-Glu-Ala-Ala-Phe-Gln-S8-Phe-BztA-Gln-NH2 | 438 |
| I-673 | Ac-PL3-Asp-Ile-B5-isoAsp-Glu-Ala-Ala-Phe-Gln-S8-Phe-BztA-Gln-NH2 | 439 |
| I-674 | Ac-PL3-Asp-Ile-B5-isoDAsp-Glu-Ala-Ala-Phe-Gln-S8-Phe-BztA-Gln-NH2 | 440 |
| I-675 | Ac-PL3-Asp-Ile-B5-RbGlu-Glu-Ala-Ala-Phe-Gln-S8-Phe-BztA-Gln-NH2 | 441 |
| I-676 | Ac-PL3-Asp-Ile-B5-SbGlu-Glu-Ala-Ala-Phe-Gln-S8-Phe-BztA-Gln-NH2 | 442 |
| I-677 | Ac-PL3-Asp-Npg-B5-Asp-Glu-Ala-Ala-Phe-Asn-S8-Phe-BztA-Gln-NH2 | 443 |
| I-678 | Ac-PL3-Asp-Npg-B5-Asp-Asp-Ala-Ala-Phe-Asn-S8-3Thi-BztA-Gln-NH2 | 444 |
| I-679 | Ac-PL3-Asp-Npg-B5-Asp-Asp-Ala-Ala-Phe-Asn-S8-3Thi-BztA-Gln-NH2 | 444 |
| I-680 | Ac-PL3-Asp-Leu-B5-Asp-Asp-Ala-Ala-Phe-Asn-S8-3Thi-BztA-Gln-NH2 | 445 |
| I-681 | Ac-PL3-Asp-Leu-B5-Asp-Asp-Ala-Ala-Phe-Asn-S8-3Thi-BztA-Gln-NH2 | 445 |
| I-682 | Ac-PL3-Asp-Npg-B5-Asp-Glu-Ala-Ala-Phe-Asn-S8-3Thi-BztA-Gln-NH2 | 446 |
| I-683 | Ac-PL3-Asp-Npg-B5-Asp-Glu-Ala-Ala-Phe-Asn-S8-3Thi-BztA-Gln-NH2 | 446 |
| I-684 | Ac-PL3-Asp-Npg-B5-Asp-Glu-Ala-Ala-Phe-Asn-PyrS2-Phe-BztA-Gln-NH2 | 447 |
| I-685 | Ac-PL3-Asp-Npg-B5-Asp-Glu-Ala-Ala-Phe-Asn-PyrS2-Phe-BztA-Gln-NH2 | 447 |
| I-686 | Ac-PL3-Asp-Npg-B5-Asp-Asp-Ala-Ala-Phe-Asn-PyrS2-3Thi-BztA-Gln-NH2 | 448 |
| I-687 | Ac-PL3-Asp-Npg-B5-Asp-Asp-Ala-Ala-Phe-Asn-PyrS2-3Thi-BztA-Gln-NH2 | 448 |
| I-688 | Ac-PL3-Asp-Leu-B5-Asp-Asp-Ala-Ala-Phe-Asn-PyrS2-3Thi-BztA-Gln-NH2 | 449 |
| I-689 | Ac-PL3-Asp-Leu-B5-Asp-Asp-Ala-Ala-Phe-Asn-PyrS2-3Thi-BztA-Gln-NH2 | 449 |
| I-690 | Ac-PL3-Asp-Npg-B5-Asp-Glu-Ala-Ala-Phe-Asn-PyrS2-3Thi-BztA-Gln-NH2 | 450 |
| I-691 | Ac-PL3-Asp-Npg-B5-Asp-Glu-Ala-Ala-Phe-Asn-PyrS2-3Thi-BztA-Gln-NH2 | 450 |
| I-692 | Ac-PL3-Asp-Npg-B5-Asp-Glu-Ala-Ala-Phe-Asn-PyrS2-Phe-BztA-His-NH2 | 451 |
| I-693 | Ac-PL3-Asp-Npg-B5-Asp-Glu-Ala-Ala-Phe-Asn-PyrS2-Phe-BztA-His-NH2 | 451 |
| I-694 | Ac-PL3-Asp-Npg-B5-Asp-Asp-Ala-Ala-Phe-Asn-PyrS2-3Thi-BztA-His-NH2 | 452 |
| I-695 | Ac-PL3-Asp-Npg-B5-Asp-Asp-Ala-Ala-Phe-Asn-PyrS2-3Thi-BztA-His-NH2 | 452 |
| I-696 | Ac-PL3-Asp-Leu-B5-Asp-Asp-Ala-Ala-Phe-Asn-PyrS2-3Thi-BztA-His-NH2 | 453 |
| I-697 | Ac-PL3-Asp-Npg-B5-Asp-Glu-Ala-Ala-Phe-Asn-PyrS2-3Thi-BztA-His-NH2 | 454 |
| I-698 | Ac-PL3-Asp-Npg-B5-Asp-Glu-Ala-Ala-Phe-Asn-PyrS2-3Thi-BztA-His-NH2 | 454 |
| I-699 | Ac-PL3-Asp-Ile-B5-Asp-TfeGA-Ala-Ala-Phe-Asn-S8-Phe-BztA-Gln-NH2 | 455 |
| I-700 | Ac-PL3-Asp-Ile-B5-Asp-TfeGA-Ala-Ala-Phe-Asn-S8-3Thi-BztA-Gln-NH2 | 456 |
| I-701 | Ac-PL3-Asp-Ile-B5-Asp-TfeGA-Ala-Ala-Phe-Asn-S8-3Thi-BztA-Gln-NH2 | 456 |
| I-702 | Ac-PL3-Asp-Ile-B5-Asp-TfeGA-Ala-Ala-Phe-Asn-S8-3Thi-BztA-His-NH2 | 457 |
| I-703 | Ac-PL3-Asp-Npg-B5-Asp-TfeGA-Ala-Ala-Phe-Asn-S8-Phe-BztA-Gln-NH2 | 458 |
| I-704 | Ac-PL3-Asp-Npg-B5-Asp-TfeGA-Ala-Ala-Phe-Asn-S8-3Thi-BztA-Gln-NH2 | 459 |
| I-705 | Ac-PL3-Asp-Npg-B5-Asp-TfeGA-Ala-Ala-Phe-Asn-S8-3Thi-BztA-His-NH2 | 460 |
| I-706 | Ac-PL3-Asp-Cha-B5-Asp-TfeGA-Ala-Ala-Phe-Asn-S8-Phe-BztA-Gln-NH2 | 461 |
| I-707 | Ac-PL3-Asp-Cha-B5-Asp-TfeGA-Ala-Ala-Phe-Asn-S8-3Thi-BztA-Gln-NH2 | 462 |
| I-708 | Ac-PL3-Asp-Cha-B5-Asp-TfeGA-Ala-Ala-Phe-Asn-S8-3Thi-BztA-Gln-NH2 | 462 |
| I-709 | Ac-PL3-Asp-Cha-B5-Asp-TfeGA-Ala-Ala-Phe-Asn-S8-3Thi-BztA-His-NH2 | 463 |
| I-710 | MeSO2-PL3-Asp-Ile-B5-Asp-Glu-Ala-Ala-Phe-Gln-S8-Phe-BztA-Gln-NH2 | 464 |
| I-711 | MeSO2-PL3-Asp-Ile-B5-Asp-Glu-Ala-Ala-Phe-Gln-S8-Phe-BztA-Gln-NH2 | 464 |
| I-712 | Ac-PL3-Asp-Npg-B5-Asp-Glu-Ala-Ala-Phe-Asn-S8-Phe-BztA-NH2 | 465 |
| I-713 | Ac-PL3-Asp-Npg-B5-Asp-Glu-Ala-Ala-Phe-Asn-S8-Phe-BztA-NH2 | 465 |
| I-714 | Ac-PL3-Asp-Ile-B5-Asp-Glu-Ala-Ala-Phe-Asn-S8-Phe-BztA-NH2 | 466 |
| I-715 | Ac-PL3-Asp-Ile-B5-Asp-Glu-Ala-Ala-Phe-Asn-S8-Phe-BztA-NH2 | 466 |
| I-716 | Ac-PL3-Asp-Leu-B5-Asp-Glu-Ala-Ala-Phe-Asn-S8-3Thi-BztA-NH2 | 467 |
| I-717 | Ac-PL3-Asp-Leu-B5-Asp-Glu-Ala-Ala-Phe-Asn-S8-3Thi-BztA-NH2 | 467 |
| I-718 | Ac-PL3-Asp-Npg-B5-Asp-Glu-Ala-Ala-Phe-Asn-S8-3Thi-BztA-NH2 | 468 |
| I-719 | Ac-PL3-Asp-Npg-B5-Asp-Glu-Ala-Ala-Phe-Asn-S8-3Thi-BztA-NH2 | 468 |
| I-720 | Ac-PL3-Asp-Ile-B5-Asp-Glu-Ala-Ala-Phe-Asn-S8-3Thi-BztA-NH2 | 469 |
| I-721 | Ac-PL3-Asp-Ile-B5-Asp-Glu-Ala-Ala-Phe-Asn-S8-3Thi-BztA-NH2 | 469 |
| I-722 | Ac-PL3-Asp-Ile-B5-Asp-Glu-Ala-Ala-Cha-Gln-S8-Phe-BztA-Gln-NH2 | 470 |
| I-723 | Ac-PL3-Asp-Ile-B5-Asp-Glu-Ala-Ala-Bip-Gln-S8-Phe-BztA-Gln-NH2 | 471 |
| I-724 | Ac-PL3-Asp-Ile-B5-Asp-Glu-Ala-Ala-3OMeF-Gln-S8-Phe-BztA-Gln-NH2 | 472 |
| I-725 | Ac-PL3-Asp-Ile-B5-Asp-Glu-Ala-Ala-DipA-Gln-S8-Phe-BztA-Gln-NH2 | 473 |
| I-726 | Ac-PL3-Asp-Ile-B5-Asp-Glu-Ala-Ala-Phg-Gln-S8-Phe-BztA-Gln-NH2 | 474 |
| I-727 | Ac-PL3-Asp-Ile-B5-Asp-Glu-Ala-Ala-Npg-Gln-S8-Phe-BztA-Gln-NH2 | 475 |
| I-728 | Ac-PL3-Asp-Ile-B5-Asp-Glu-Ala-Ala-nLeu-Gln-S8-Phe-BztA-Gln-NH2 | 476 |
| I-729 | Ac-PL3-Asp-Leu-B5-Asp-Glu-Ala-Ala-Phe-Asn-S8-Phe-BztA-Gln-Ala-NH2 | 477 |
| I-730 | Ac-PL3-Asp-Leu-B5-Asp-Glu-Ala-Ala-Phe-Asn-S8-Phe-BztA-Gln-Ala-NH2 | 477 |
| I-731 | Ac-PL3-Asp-Leu-B5-Asp-Glu-Ala-Ala-Phe-Asn-S8-Phe-BztA-Gln-dAla-NH2 | 478 |
| I-732 | Ac-PL3-Asp-Leu-B5-Asp-Glu-Ala-Ala-Phe-Asn-S8-Phe-BztA-Gln-Ile-NH2 | 479 |
| I-733 | Ac-PL3-Asp-Leu-B5-Asp-Glu-Ala-Ala-Phe-Asn-S8-Phe-BztA-Gln-Ile-NH2 | 479 |
| I-734 | Ac-PL3-Asp-Leu-B5-Asp-Glu-Ala-Ala-Phe-Asn-S8-Phe-BztA-Gln-dIle-NH2 | 480 |
| I-735 | Ac-PL3-Asp-Leu-B5-Asp-Glu-Ala-Ala-Phe-Asn-S8-Phe-BztA-Gln-dIle-NH2 | 480 |
| I-736 | Ac-PL3-Asp-Leu-B5-Asp-Glu-Ala-Ala-Phe-Asn-S8-Phe-BztA-Gln-Aib-NH2 | 481 |
| I-737 | Ac-PL3-Asp-Leu-B5-Asp-Glu-Ala-Ala-Phe-Asn-S8-Phe-BztA-Gln-Aib-NH2 | 481 |
| I-738 | Ac-PL3-Asp-Leu-B5-Asp-Glu-Ala-Ala-Phe-Asn-S8-Phe-BztA-His-Ala-NH2 | 482 |
| I-739 | Ac-PL3-Asp-Leu-B5-Asp-Glu-Ala-Ala-Phe-Asn-S8-Phe-BztA-His-dAla-NH2 | 483 |
| I-740 | Ac-PL3-Asp-Leu-B5-Asp-Glu-Ala-Ala-Phe-Asn-S8-Phe-BztA-His-Ile-NH2 | 484 |
| I-741 | Ac-PL3-Asp-Leu-B5-Asp-Glu-Ala-Ala-Phe-Asn-S8-Phe-BztA-His-Ile-NH2 | 484 |
| I-742 | Ac-PL3-Asp-Leu-B5-Asp-Glu-Ala-Ala-Phe-Asn-S8-Phe-BztA-His-dIle-NH2 | 485 |
| I-743 | Ac-PL3-Asp-Leu-B5-Asp-Glu-Ala-Ala-Phe-Asn-S8-Phe-BztA-His-Aib-NH2 | 486 |
| I-744 | Ac-PL3-Asp-Leu-B5-Asp-Glu-Ala-Ala-Phe-Asn-S8-Phe-BztA-dHis-NH2 | 487 |
| I-745 | Ac-PL3-Asp-Leu-B5-Asp-Glu-Ala-Ala-Phe-Asn-S8-Phe-BztA-dHis-NH2 | 487 |
| I-746 | Ac-PL3-Asp-Leu-B5-Asp-Glu-Ala-Ala-Phe-Asn-S8-Phe-BztA-NMeHis-NH2 | 488 |
| I-747 | Ac-PL3-Asp-Leu-B5-Asp-Glu-Ala-Ala-Phe-Asn-S8-Phe-BztA-NMeHis-NH2 | 488 |
| I-748 | Ac-PL3-Asp-Leu-B5-Asp-Glu-Ala-Ala-Phe-Asn-S8-Phe-BztA-Thr-NH2 | 489 |
| I-749 | Ac-PL3-Asp-Leu-B5-Asp-Glu-Ala-Ala-Phe-Asn-S8-Phe-BztA-Thr-NH2 | 489 |
| I-750 | Ac-PL3-Asp-Leu-B5-Asp-Glu-Ala-Ala-Phe-Asn-S8-Phe-BztA-Ser-NH2 | 490 |
| I-751 | Ac-PL3-Asp-Leu-B5-Asp-Glu-Ala-Ala-Phe-Asn-S8-Phe-BztA-Ser-NH2 | 490 |
| I-752 | Ac-PL3-Asp-Leu-B5-Asp-Glu-Ala-Ala-Phe-Asn-S8-Phe-BztA-Asn-NH2 | 491 |
| I-753 | Ac-PL3-Asp-Leu-B5-Asp-Glu-Ala-Ala-Phe-Asn-S8-Phe-BztA-Asn-NH2 | 491 |
| I-754 | Ac-PL3-Asp-Leu-B5-Asp-Glu-Ala-Ala-Phe-Asn-S8-Phe-BztA-dThr-NH2 | 492 |
| I-755 | Ac-PL3-Asp-Leu-B5-Asp-Glu-Ala-Ala-Phe-Asn-S8-Phe-BztA-dThr-NH2 | 492 |
| I-756 | Ac-PL3-Asp-Leu-B5-Asp-Glu-Ala-Ala-Phe-Asn-S8-Phe-BztA-dSer-NH2 | 493 |
| I-757 | Ac-PL3-Asp-Leu-B5-Asp-Glu-Ala-Ala-Phe-Asn-S8-Phe-BztA-dAsn-NH2 | 494 |
| I-758 | Ac-PL3-Asp-Leu-B5-Asp-Glu-Ala-Ala-Phe-Asn-S8-Phe-BztA-dAsn-NH2 | 494 |
| I-759 | Ac-PL3-Asp-Leu-B5-Asp-Glu-Ala-Ala-Phe-Asn-S8-Phe-BztA-NMeS-NH2 | 495 |
| I-760 | Ac-PL3-Asp-Leu-B5-Asp-Glu-Ala-Ala-Phe-Asn-S8-Phe-BztA-NMeS-NH2 | 495 |
| I-761 | Ac-PL3-Asp-Npg-B5-Asp-TfeGA-Ala-Ala-Phe-Asn-PyrS2-3Thi-BztA-Gln-NH2 | 496 |
| I-762 | Ac-PL3-Asp-Npg-B5-Asp-TfeGA-Ala-Ala-Phe-Asn-PyrS2-3Thi-BztA-Gln-NH2 | 496 |
| I-763 | Ac-PL3-Asp-Npg-B5-Asp-Asp-Ala-Ala-Phe-Gln-PyrS2-3Thi-BztA-Gln-NH2 | 497 |
| I-764 | Ac-PL3-Asp-Npg-B5-Asp-Asp-Ala-Ala-Phe-Gln-PyrS2-3Thi-BztA-Gln-NH2 | 497 |
| I-765 | Ac-PL3-Asp-Npg-B5-Asp-Asp-Ala-Ala-Phe-Asn-SeN-3Thi-BztA-Gln-NH2 | 498 |
| I-766 | Ac-PL3-Asp-Npg-B5-Asp-Asp-Ala-Ala-Phe-Asn-SeN-3Thi-BztA-Gln-NH2 | 498 |
| I-767 | Ac-PL3-Asp-Npg-B5-Asp-Asp-Ala-Ala-Phe-Asn-PyrS3-3Thi-BztA-Gln-NH2 | 499 |
| I-768 | Ac-PL3-Asp-Npg-B5-Asp-Asp-Ala-Ala-Phe-Asn-PyrS3-3Thi-BztA-Gln-NH2 | 499 |
| I-769 | Ac-PL3-Asp-Npg-B5-Asp-TfeGA-Ala-Ala-Phe-Asn-PyrS2-3Thi-BztA-His-NH2 | 500 |
| I-770 | Ac-PL3-Asp-Npg-B5-Asp-TfeGA-Ala-Ala-Phe-Asn-PyrS2-3Thi-BztA-His-NH2 | 500 |
| I-771 | Ac-PL3-Asp-Npg-B5-Asp-Asp-Ala-Ala-Phe-Gln-PyrS2-3Thi-BztA-His-NH2 | 501 |
| I-772 | Ac-PL3-Asp-Npg-B5-Asp-Asp-Ala-Ala-Phe-Gln-PyrS2-3Thi-BztA-His-NH2 | 501 |
| I-773 | Ac-PL3-Asp-Npg-B5-Asp-Asp-Ala-Ala-Phe-Asn-SeN-3Thi-BztA-His-NH2 | 502 |
| I-774 | Ac-PL3-Asp-Npg-B5-Asp-Asp-Ala-Ala-Phe-Asn-SeN-3Thi-BztA-His-NH2 | 502 |
| I-775 | Ac-PL3-Asp-Npg-B5-Asp-Asp-Ala-Ala-Phe-Asn-PyrS3-3Thi-BztA-His-NH2 | 503 |
| I-776 | Ac-PL3-Asp-Npg-B5-Asp-Asp-Ala-Ala-Phe-Asn-PyrS3-3Thi-BztA-His-NH2 | 503 |
| I-777 | Ac-PL3-Asp-Npg-B5-Asp-Asp-Ala-Ala-Phe-Asn-PyrS2-Phe-BztA-His-NH2 | 504 |
| I-778 | Ac-PL3-Asp-Npg-B5-Asp-Asp-Ala-Ala-Phe-Asn-PyrS2-2Thi-BztA-Gln-NH2 | 505 |
| I-779 | Ac-PL3-Asp-Npg-B5-Asp-Asp-Ala-Ala-Phe-Asn-PyrS2-2Thi-BztA-His-NH2 | 506 |
| I-780 | Ac-PL3-Asp-Npg-B5-Asp-Asp-Ala-Ala-Phe-Asn-PyrS2-2OMeF-BztA-Gln-NH2 | 507 |
| I-781 | Ac-PL3-Asp-Npg-B5-Asp-Asp-Ala-Ala-Phe-Asn-PyrS2-2OMeF-BztA-His-NH2 | 508 |
| I-782 | Ac-PL3-Asp-Npg-B5-Asp-Asp-Ala-Ala-Phe-Asn-PyrS2-2MeF-BztA-His-NH2 | 509 |
| I-783 | Ac-PL3-Asp-Npg-B5-Asp-Asp-Ala-Ala-Phe-Asn-PyrS2-2C1F-BztA-Gln-NH2 | 510 |
| I-784 | Ac-PL3-Asp-Npg-B5-Asp-Asp-Ala-Ala-Phe-Asn-PyrS2-2C1F-BztA-His-NH2 | 511 |
| I-785 | Ac-PL3-Asp-Npg-B5-Asp-Asp-Ala-Ala-Phe-Asn-PyrS2-3Thi-BztA-NH2 | 512 |
| I-786 | Ac-PL3-Asp-Npg-B5-Asp-Glu-Ala-Ala-Phe-Asn-PyrS2-3Thi-BztA-NH2 | 513 |
| I-787 | Ac-PL3-Asp-hLeu-B5-Asp-Asp-Ala-Ala-Phe-Asn-PyrS2-3Thi-BztA-Gln-NH2 | 514 |
| I-788 | Ac-PL3-Asp-hLeu-B5-Asp-Asp-Ala-Ala-Phe-Asn-PyrS2-3Thi-BztA-His-NH2 | 515 |
| I-789 | Ac-PL3-Asp-Npg-B5-Asp-Asp-Ala-Ala-Phe-Asn-PyrS2-3Thi-1NapA-His-NH2 | 516 |
| I-790 | Ac-PL3-Asp-Npg-B5-Asp-Asp-Ala-Ala-Phe-Asn-PyrS2-3Thi-2NapA-His-NH2 | 517 |
| I-791 | Ac-PL3-Asp-Npg-B5-Asp-Asp-Ala-Ala-Phe-Asn-PyrS2-3Thi-5C1W-His-NH2 | 518 |
| I-792 | Ac-PL3-Asp-Npg-B5-Asp-Asp-Ala-Ala-Phe-Asn-PyrS2-3Thi-Trp-His-NH2 | 519 |
| I-793 | Ac-PL3-Asp-Npg-B5-Asp-Asp-Ala-Ala-Phe-Asn-PyrS2-BztA-BztA-His-NH2 | 520 |
| I-794 | Ac-PL3-Asp-Npg-B5-Asp-Asp-Ala-Ala-Phe-Asn-PyrS2-1NapA-BztA-His-NH2 | 521 |
| I-795 | Ac-PL3-Asp-Npg-B5-Asp-Asp-Ala-Ala-Phe-Asn-PyrS2-2NapA-BztA-His-NH2 | 522 |
| I-796 | Ac-PL3-Phe-Npg-B5-Asp-Asp-Ala-Ala-Asp-Asn-PyrS2-3Thi-BztA-His-NH2 | 523 |
| I-797 | Ac-PL3-Phe-Npg-B5-Asp-Asp-Ala-Ala-Asp-Asn-PyrS2-3Thi-BztA-Gln-NH2 | 524 |
| I-798 | Ac-PL3-Asp-Npg-B5-Asp-Asp-Ala-Ala-Phe-Asn-PyrS2-3Thi-6C1W-His-NH2 | 525 |
| I-799 | Ac-PL3-Asp-Npg-B5-Asp-Asp-Ala-Ala-Phe-Asn-PyrS2-3Thi-1MeW-His-NH2 | 526 |
| I-800 | Ac-PL3-Asp-Npg-B5-Asp-Asp-Ala-Ala-Phe-Asn-PyrS2-3Thi-5FW-His-NH2 | 527 |
| I-801 | Ac-PL3-Asp-Npg-B5-Asp-Asp-Ala-Ala-Phe-Leu-PyrS2-3Thi-BztA-Gln-NH2 | 528 |
| I-802 | Ac-PL3-Asp-Npg-B5-Asp-Asp-Ala-Ala-Phe-Leu-PyrS2-3Thi-BztA-His-NH2 | 529 |
| I-803 | Ac-PL3-Asp-Npg-B5-Asp-Asp-Ala-Ala-Phe-Hse-PyrS2-3Thi-BztA-Gln-NH2 | 530 |
| I-804 | Ac-PL3-Asp-Npg-B5-Asp-Asp-Ala-Ala-Phe-Hse-PyrS2-3Thi-BztA-His-NH2 | 531 |
| I-805 | Ac-PL3-Asp-Npg-B5-Asp-Asp-Ala-Ala-Phe-Cit-PyrS2-3Thi-BztA-Gln-NH2 | 532 |
| I-806 | Ac-PL3-Asp-Npg-B5-Asp-Asp-Ala-Ala-Phe-Cit-PyrS2-3Thi-BztA-His-NH2 | 533 |
| I-807 | Ac-PL3-Asp-Npg-B5-Asp-Asp-Ala-Ala-Phe-Phe-PyrS2-3Thi-BztA-Gln-NH2 | 534 |
| I-808 | Ac-PL3-Asp-Npg-B5-Asp-Asp-Ala-Ala-Phe-Phe-PyrS2-3Thi-BztA-His-NH2 | 535 |
| I-809 | Ac-PL3-Asp-Npg-B5-Asp-Asp-Ala-Ala-Phe-Thr-PyrS2-3Thi-BztA-Gln-NH2 | 536 |
| I-810 | Ac-PL3-Asp-Npg-B5-Asp-Asp-Ala-Ala-Phe-Thr-PyrS2-3Thi-BztA-His-NH2 | 537 |
| I-811 | Ac-PL3-Asp-Npg-B5-Asp-Asp-Ala-Ala-Phe-Asn-PyrS2-4Thz-BztA-Gln-NH2 | 538 |
| I-812 | Ac-PL3-Asp-Npg-B5-Asp-Asp-Ala-Ala-4Thz-Asn-PyrS2-3Thi-BztA-Gln-NH2 | 539 |
| I-813 | Ac-PL3-Asp-Npg-B5-Asp-Asp-Ala-Ala-Phe-Asn-PyrS2-3Thi-BztA-dHis-NH2 | 540 |
| I-814 | Ac-PL3-Asp-Npg-B5-Asp-Asp-Ala-Ala-Phe-Asn-PyrS2-3Thi-BztA-Thr-NH2 | 541 |
| I-815 | Ac-PL3-Asp-Npg-B5-Asp-Asp-Ala-Ala-Phe-Asn-PyrS2-3Thi-BztA-Ser-NH2 | 542 |
| I-816 | Ac-PL3-Asp-Npg-B5-Asp-Asp-Ala-Ala-Phe-Asn-PyrS2-3Thi-BztA-Asn-NH2 | 543 |
| I-817 | Ac-PL3-Asp-Npg-B5-Asp-Asp-Ala-Ala-Phe-Asn-PyrS2-3Thi-BztA-dThr-NH2 | 544 |
| I-818 | Ac-PL3-Asp-Npg-B5-Asp-Asp-Ala-Ala-Phe-Asn-PyrS2-3Thi-BztA-dAsn-NH2 | 545 |
| I-819 | Ac-PL3-Asp-Npg-B5-Asp-Asp-Ala-Ala-Phe-Asn-PyrS2-3Thi-BztA-Gln-Ala-NH2 | 546 |
| I-820 | Ac-PL3-Asp-Npg-B5-Asp-Asp-Ala-Ala-Phe-Asn-PyrS2-3Thi-BztA-His-Ala-NH2 | 547 |
| I-821 | Ac-PL3-Asp-Npg-B5-Asp-Asp-Ala-Ala-Phe-Asn-PyrS2-3Thi-BztA-Asn-Ala-NH2 | 548 |
| I-822 | Ac-PL3-Asp-Npg-B5-Asp-Asp-Ala-Ala-Phe-Asn-PyrS2-3Thi-BztA-Gln-dAla-NH2 | 549 |
| I-823 | Ac-PL3-Asp-Npg-B5-Asp-Asp-Ala-Ala-Phe-Asn-PyrS2-3Thi-BztA-His-dAla-NH2 | 550 |
| I-824 | Ac-PL3-Asp-Npg-B5-Asp-Asp-Ala-Ala-Phe-Asn-PyrS2-3Thi-BztA-Asn-dAla-NH2 | 551 |
| I-825 | Ac-PL3-Asp-Npg-B5-Asp-Asp-Ala-Ala-Phe-Asn-PyrS3-3Thi-BztA-Gln-Ala-NH2 | 552 |
| I-826 | Ac-PL3-Asp-Npg-B5-Asp-Asp-Ala-Ala-Phe-Asn-PyrS3-3Thi-BztA-Gln-Ala-NH2 | 552 |
| I-827 | Ac-PL3-Asp-Npg-B5-Asp-Asp-Ala-Ala-Phe-Asn-PyrS3-3Thi-BztA-His-Ala-NH2 | 553 |
| I-828 | Ac-PL3-Asp-Npg-B5-Asp-Asp-Ala-Ala-Phe-Asn-PyrS3-3Thi-BztA-His-Ala-NH2 | 553 |
| I-829 | Ac-PL3-Asp-Npg-B5-Asp-Asp-Ala-Ala-Phe-Asn-PyrS3-3Thi-BztA-Asn-Ala-NH2 | 554 |
| I-830 | Ac-PL3-Asp-Npg-B5-Asp-Asp-Ala-Ala-Phe-Asn-PyrS3-3Thi-BztA-Gln-dAla-NH2 | 555 |
| I-831 | Ac-PL3-Asp-Npg-B5-Asp-Asp-Ala-Ala-Phe-Asn-PyrS3-3Thi-BztA-Gln-dAla-NH2 | 555 |
| I-832 | Ac-PL3-Asp-Npg-B5-Asp-Asp-Ala-Ala-Phe-Asn-PyrS3-3Thi-BztA-His-dAla-NH2 | 556 |
| I-833 | Ac-PL3-Asp-Npg-B5-Asp-Asp-Ala-Ala-Phe-Asn-PyrS3-3Thi-BztA-His-dAla-NH2 | 556 |
| I-834 | Ac-PL3-Asp-Npg-B5-Asp-Asp-Ala-Ala-Phe-Asn-PyrS3-3Thi-BztA-Asn-dAla-NH2 | 557 |
| I-835 | Ac-PL3-Asp-Npg-B5-Asp-Asp-Ala-Ala-Phe-Asn-PyrS3-3Thi-BztA-Asn-dAla-NH2 | 557 |
| I-836 | Ac-PL3-Asp-Npg-B5-Asp-Asn-Ala-Ala-Phe-Asn-PyrS2-3Thi-BztA-Gln-NH2 | 558 |
| I-837 | Ac-PL3-Asp-Npg-B5-Asp-Asn-Ala-Ala-Phe-Asn-PyrS2-3Thi-BztA-His-NH2 | 559 |
| I-838 | Ac-PL3-Asp-Npg-B5-Asp-Gln-Ala-Ala-Phe-Asn-PyrS2-3Thi-BztA-Gln-NH2 | 560 |
| I-839 | Ac-PL3-Asp-Npg-B5-Asp-Gln-Ala-Ala-Phe-Asn-PyrS2-3Thi-BztA-His-NH2 | 561 |
| I-840 | Ac-PL3-Asp-Npg-B5-Asp-Cit-Ala-Ala-Phe-Asn-PyrS2-3Thi-BztA-Gln-NH2 | 562 |
| I-841 | Ac-PL3-Asp-Npg-B5-Asp-Cit-Ala-Ala-Phe-Asn-PyrS2-3Thi-BztA-His-NH2 | 563 |
| I-842 | Ac-PL3-Asp-Npg-B5-Asp-Tyr-Ala-Ala-Phe-Asn-PyrS2-3Thi-BztA-Gln-NH2 | 564 |
| I-843 | Ac-PL3-Asp-Npg-B5-Asp-Tyr-Ala-Ala-Phe-Asn-PyrS2-3Thi-BztA-His-NH2 | 565 |
| I-844 | Ac-PL3-Asp-Npg-B5-Asp-Thr-Ala-Ala-Phe-Asn-PyrS2-3Thi-BztA-Gln-NH2 | 566 |
| I-845 | Ac-PL3-Asp-Npg-B5-Asp-Thr-Ala-Ala-Phe-Asn-PyrS2-3Thi-BztA-His-NH2 | 567 |
| I-846 | Ac-PL3-Asp-Npg-B5-Asp-Leu-Ala-Ala-Phe-Asn-PyrS2-3Thi-BztA-Gln-NH2 | 568 |
| I-847 | Ac-PL3-Asp-Npg-B5-Asp-Leu-Ala-Ala-Phe-Asn-PyrS2-3Thi-BztA-His-NH2 | 569 |
| I-848 | Ac-PL3-Asp-Npg-B5-Asp-TfeGA-Ala-Ala-Phe-Phe-PyrS2-3Thi-BztA-Gln-NH2 | 570 |
| I-849 | Ac-PL3-Asp-Npg-B5-Asp-TfeGA-Ala-Ala-Phe-Leu-PyrS2-3Thi-BztA-Gln-NH2 | 571 |
| I-850 | Ac-PL3-Asp-Npg-B5-Asp-4COOHF-Ala-Ala-Phe-Phe-PyrS2-3Thi-BztA-Gln-NH2 | 572 |
| I-851 | Ac-PL3-Asp-Npg-B5-Asp-4COOHF-Ala-Ala-Phe-Leu-PyrS2-3Thi-BztA-Gln-NH2 | 573 |
| I-852 | Ac-PL3-Asp-Npg-B5-Asp-3COOHF-Ala-Ala-Phe-Phe-PyrS2-3Thi-BztA-Gln-NH2 | 574 |
| I-853 | Ac-PL3-Asp-Npg-B5-Asp-2COOHF-Ala-Ala-Phe-Phe-PyrS2-3Thi-BztA-Gln-NH2 | 575 |
| I-854 | Ac-PL3-Asp-Npg-B5-Asp-2COOHF-Ala-Ala-Phe-Leu-PyrS2-3Thi-BztA-Gln-NH2 | 576 |
| I-855 | Ac-PL3-Asp-Npg-B5-Asp-Asn-Ala-Ala-Phe-Phe-PyrS2-3Thi-BztA-Gln-NH2 | 577 |
| I-856 | Ac-PL3-Asp-Npg-B5-Asp-Asn-Ala-Ala-Phe-Leu-PyrS2-3Thi-BztA-Gln-NH2 | 578 |
| I-857 | Ac-PL3-Asp-Npg-B5-Asp-Asn-Ala-Ala-Phe-Asn-PyrS2-3Thi-BztA-NH2 | 579 |
| I-858 | Ac-PL3-Asp-Npg-B5-Asp-Gln-Ala-Ala-Phe-Asn-PyrS2-3Thi-BztA-NH2 | 580 |
| I-859 | Ac-PL3-Asp-Npg-B5-Asp-Thr-Ala-Ala-Phe-Asn-PyrS2-3Thi-BztA-NH2 | 581 |
| I-860 | Ac-PL3-Asp-Npg-B5-Asp-Thr-Ala-Ala-Phe-Asn-PyrS2-3Thi-BztA-NH2 | 581 |
| I-861 | Ac-PL3-Asp-Npg-B5-Asp-Cit-Ala-Ala-Phe-Asn-PyrS2-3Thi-BztA-NH2 | 582 |
| I-862 | Ac-PL3-Asp-Npg-B5-Asp-Leu-Ala-Ala-Phe-Asn-PyrS2-3Thi-BztA-NH2 | 583 |
| I-863 | Ac-PL3-Asp-Npg-B5-Asp-His-Ala-Ala-Phe-Asn-PyrS2-3Thi-BztA-NH2 | 584 |
| I-864 | Ac-PL3-Asp-Npg-B5-Asp-His-Ala-Ala-Phe-Asn-PyrS2-3Thi-BztA-Gln-NH2 | 585 |
| I-865 | Ac-PL3-Asp-Npg-B5-Asp-Asp-[FAM6Ppg][1TriAc]Lys-Ala-Phe-Asn-PyrS2-3Thi- | 586 |
| | BztA-His-NH2 | |
| I-866 | Ac-PL3-Asp-Npg-B5-Asp-Asp-Ala-[FAM6Ppg][1TriAc]Lys-Phe-Asn-PyrS2-3Thi- | 587 |
| | BztA-His-NH2 | |
| I-867 | Ac-PL3-Asp-Npg-B5-Asp-Leu-[FAM6Ppg][p1TB]Lys-Ala-Phe-Asn-PyrS2-3Thi-BztA- | 588 |
| | Gln-NH2 | |
| I-868 | Ac-PL3-Asp-Npg-B5-Asp-Leu-[FAM6Ppg][p1TB]Lys-Ala-Phe-Leu-PyrS2-3Thi-BztA- | 589 |
| | Gln-NH2 | |
| I-869 | Ac-PL3-Asp-Npg-B5-Asp-Leu-[FAM6Ppg][p1TB]Lys-Ala-Phe-Phe-PyrS2-3Thi-BztA- | 590 |
| | Gln-NH2 | |
| I-870 | Ac-PL3-Asp-Npg-B5-Asp-Asp-Ala-Ala-Phe-Asn-PyrS2-3Thi-BztA-Gln-Ala-Ala | 591 |
| I-871 | Ac-PL3-Asp-Npg-B5-Asp-Asp-Ala-Ala-Phe-Asn-PyrS2-3Thi-BztA-Gln-dAla-Ala | 592 |
| I-872 | Ac-PL3-Asp-Npg-B5-Asp-Asp-Ala-Ala-Phe-Asn-PyrS2-3Thi-BztA-Gln-dAla-dAla | 593 |
| I-873 | Ac-PL3-Asp-Npg-B5-Asp-Asp-Ala-Ala-Phe-Asn-PyrS2-3Thi-BztA-Gln-Ala-Ala | 591 |
| I-874 | Ac-PL3-Asp-Npg-B5-Asp-Asp-Ala-Ala-Phe-Asn-S8-3Thi-BztA-Gln-Ala-Ala | 594 |
| I-875 | Ac-PL3-Asp-Npg-B5-Asp-Asp-Ala-Ala-Phe-Asn-S8-3Thi-BztA-Gln-dAla-Ala | 595 |
| I-876 | Ac-PL3-Asp-Npg-B5-Asp-Asp-Ala-Ala-Phe-Asn-S8-3Thi-BztA-Gln-dAla-dAla | 596 |
| I-877 | Ac-PL3-Asp-Npg-B5-Asp-Asp-Ala-Ala-Phe-Asn-S8-3Thi-BztA-Gln-Ala-Ala | 594 |
| I-878 | Ac-PL3-Asp-Npg-B5-Asp-Asp-Ala-Ala-Phe-Asn-PyrS2-3Thi-BztA-[AzAc]Lys-NH2 | 597 |
| I-879 | Ac-PL3-Asp-Npg-B5-Asp-Asp-[AzAc]Lys-Ala-Phe-Asn-PyrS2-3Thi-BztA-Gln-NH2 | 598 |
| I-880 | Ac-PL3-Asp-[AzAc]Lys-B5-Asp-Asp-Ala-Ala-Phe-Asn-PyrS2-3Thi-BztA-Gln-NH2 | 599 |
| I-881 | Ac-PL3-Asp-Npg-B5-Asp-Asp-Ala-Ala-Phe-Asn-PyrS2-3Thi-BztA-Gln-6AmHex | 600 |
| I-882 | Ac-PL3-Asp-Npg-B5-Asp-Asp-Ala-Ala-Phe-Asn-PyrS2-3Thi-BztA-Gln-6AmHex | 600 |
| I-883 | Ac-PL3-Asp-Npg-B5-Asp-Asp-Ala-[35CF3PhPr]Lys-Phe-Asn-PyrS2-3Thi-BztA-Gln- | 601 |
| | NH2 | |
| I-884 | Ac-PL3-Asp-Npg-B5-Asp-Asp-Ala-[1NapPr]Lys-Phe-Asn-PyrS2-3Thi-BztA-Gln-NH2 | 602 |
| I-885 | Ac-PL3-Asp-Npg-B5-Asp-Asp-Ala-[22PhPr]Lys-Phe-Asn-PyrS2-3Thi-BztA-Gln-NH2 | 603 |
| I-886 | Ac-PL3-Asp-Npg-B5-Asp-Asp-Ala-[MorphAc]Lys-Phe-Asn-PyrS2-3Thi-BztA-Gln- | 604 |
| | NH2 | |
| I-887 | Ac-PL3-Asp-Npg-B5-Asp-Asp-Ala-[MePipAc]Lys-Phe-Asn-PyrS2-3Thi-BztA-Gln- | 605 |
| | NH2 | |
| I-888 | Ac-PL3-Asp-Npg-B5-Asp-Asp-Ala-[MeBipipAc]Lys-Phe-Asn-PyrS2-3Thi-BztA-Gln- | 606 |
| | NH2 | |
| I-889 | Ac-PL3-Asp-Npg-B5-Asp-Asp-Ala-[4MePipBz]Lys-Phe-Asn-PyrS2-3Thi-BztA-Gln- | 607 |
| | NH2 | |
| I-890 | Ac-PL3-Asp-Npg-B5-Asp-Asp-Ala-[MeMorphBz]Lys-Phe-Asn-PyrS2-3Thi-BztA-Gln- | 608 |
| | NH2 | |
| I-891 | Ac-PL3-Asp-Npg-B5-Asp-Asp-Ala-[Me2NCBz]Lys-Phe-Asn-PyrS2-3Thi-BztA-Gln- | 609 |
| | NH2 | |
| I-892 | Ac-PL3-Asp-Npg-B5-Asp-Asp-Ala-[mPEG2]Lys-Phe-Asn-PyrS2-3Thi-BztA-Gln-NH2 | 610 |
| I-893 | Ac-PL3-Asp-Npg-B5-Asp-Asp-Ala-[mPEG2]Lys-Phe-Asn-PyrS2-3Thi-BztA-Gln-NH2 | 610 |
| I-894 | Ac-PL3-Asp-Npg-B5-Asp-Asp-Ala-[mPEG4]Lys-Phe-Asn-PyrS2-3Thi-BztA-Gln-NH2 | 611 |
| I-895 | Ac-PL3-Asp-Npg-B5-Asp-Asp-Ala-[mPEG6]Lys-Phe-Asn-PyrS2-3Thi-BztA-Gln-NH2 | 612 |
| I-896 | Ac-PL3-Asp-Npg-B5-Asp-Asp-Ala-[mPEG8]Lys-Phe-Asn-PyrS2-3Thi-BztA-Gln-NH2 | 613 |
| I-897 | Ac-PL3-Asp-Npg-B5-Asp-Asp-Ala-[Bua]Lys-Phe-Asn-PyrS2-3Thi-BztA-Gln-NH2 | 614 |
| I-898 | Ac-PL3-Asp-Npg-B5-Asp-Asp-Ala-[Oct]Lys-Phe-Asn-PyrS2-3Thi-BztA-Gln-NH2 | 615 |
| I-899 | Ac-PL3-Asp-Npg-B5-Asp-Asp-Ala-[AdamantC]Lys-Phe-Asn-PyrS2-3Thi-BztA-Gln- | 616 |
| | NH2 | |
| I-900 | Ac-PL3-Asp-Npg-B5-Asp-Asp-Ala-[Me3AdamantC]Lys-Phe-Asn-PyrS2-3Thi-BztA- | 617 |
| | Gln-NH2 | |
| I-901 | Ac-PL3-Asp-Npg-B5-Asp-Asp-Ala-[AdamantPro]Lys-Phe-Asn-PyrS2-3Thi-BztA-Gln- | 618 |
| | NH2 | |
| I-902 | Ac-PL3-Asp-Npg-B5-Asp-Asp-Ala-Ala-Phe-Asn-PyrS2-3Thi-BztA-Gln- | 619 |
| | [35CF3PhPr]Lys-NH2 | |
| I-903 | Ac-PL3-Asp-Npg-B5-Asp-Asp-Ala-Ala-Phe-Asn-PyrS2-3Thi-BztA-Gln-[1NapPr]Lys- | 620 |
| | NH2 | |
| I-904 | Ac-PL3-Asp-Npg-B5-Asp-Asp-Ala-Ala-Phe-Asn-PyrS2-3Thi-BztA-Gln-[22PhPr]Lys- | 621 |
| | NH2 | |
| I-905 | Ac-PL3-Asp-Npg-B5-Asp-Asp-Ala-Ala-Phe-Asn-PyrS2-3Thi-BztA-Gln- | 622 |
| | [Morph Ac]Lys-NH2 | |
| I-906 | Ac-PL3-Asp-Npg-B5-Asp-Asp-Ala-Ala-Phe-Asn-PyrS2-3Thi-BztA-Gln- | 623 |
| | MePipAc Lys-NH2 | |
| I-907 | Ac-PL3-Asp-Npg-B5-Asp-Asp-Ala-Ala-Phe-Asn-PyrS2-3Thi-BztA-Gln- | 624 |
| | [MeBipipAc]Lys-NH2 | |
| I-908 | Ac-PL3-Asp-Npg-B5-Asp-Asp-Ala-Ala-Phe-Asn-PyrS2-3Thi-BztA-Gln- | 625 |
| | [4MePipBz]Lys-NH2 | |
| I-909 | Ac-PL3-Asp-Npg-B5-Asp-Asp-Ala-Ala-Phe-Asn-PyrS2-3Thi-BztA-Gln- | 626 |
| | [MeMorphBz]Lys-NH2 | |
| I-910 | Ac-PL3-Asp-Npg-B5-Asp-Asp-Ala-Ala-Phe-Asn-PyrS2-3Thi-BztA-Gln- | 627 |
| | [Me2NCBz]Lys-NH2 | |
| I-911 | Ac-PL3-Asp-Npg-B5-Asp-Asp-Ala-Ala-Phe-Asn-PyrS2-3Thi-BztA-Gln-[mPEG2]Lys- | 628 |
| | NH2 | |
| I-912 | Ac-PL3-Asp-Npg-B5-Asp-Asp-Ala-Ala-Phe-Asn-PyrS2-3Thi-BztA-Gln-[mPEG4]Lys- | 629 |
| | NH2 | |
| I-913 | Ac-PL3-Asp-Npg-B5-Asp-Asp-Ala-Ala-Phe-Asn-PyrS2-3Thi-BztA-Gln-[mPEG6]Lys- | 630 |
| | NH2 | |
| I-914 | Ac-PL3-Asp-Npg-B5-Asp-Asp-Ala-Ala-Phe-Asn-PyrS2-3Thi-BztA-Gln-[mPEG8]Lys- | 631 |
| | NH2 | |
| I-915 | Ac-PL3-Asp-Npg-B5-Asp-Asp-Ala-Ala-Phe-Asn-PyrS2-3Thi-BztA-Gln-[2Napc]Lys- | 632 |
| | NH2 | |
| I-916 | Ac-PL3-Asp-Npg-B5-Asp-Asp-Ala-Ala-Phe-Asn-PyrS2-3Thi-BztA-Gln-[1Napc]Lys- | 633 |
| | NH2 | |
| I-917 | Ac-PL3-Asp-Npg-B5-Asp-Asp-Ala-Ala-Phe-Asn-PyrS2-3Thi-BztA-Gln-[Bua]Lys-NH2 | 634 |
| I-918 | Ac-PL3-Asp-Npg-B5-Asp-Asp-Ala-Ala-Phe-Asn-PyrS2-3Thi-BztA-Gln-[Oct]Lys-NH2 | 635 |
| I-919 | Ac-PL3-Asp-Npg-B5-Asp-Asp-Ala-Ala-Phe-Asn-PyrS2-3Thi-BztA-Gln- | 636 |
| | [AdamantC]Lys-NH2 | |
| I-920 | Ac-PL3-Asp-Npg-B5-Asp-Asp-Ala-Ala-Phe-Asn-PyrS2-3Thi-BztA-Gln- | 637 |
| | [Me3AdamantC]Lys-NH2 | |
| I-921 | Ac-PL3-Asp-Npg-B5-Asp-TfeGA-Ala-Ala-Phe-Asn-PyrS2-2C1F-BztA-Gln-NH2 | 638 |
| I-922 | Ac-PL3-Asp-Npg-B5-Asp-TfeGA-Ala-Ala-Phe-Thr-PyrS2-2C1F-BztA-Gln-NH2 | 639 |
| I-923 | Ac-PL3-Asp-Npg-B5-Asp-TfeGA-Ala-Ala-Phe-Phe-PyrS2-2C1F-BztA-Gln-NH2 | 640 |
| I-924 | Ac-PL3-Asp-Npg-B5-Asp-TfeGA-Ala-Ala-Phe-Asn-PyrS2-2BrF-BztA-Gln-NH2 | 641 |
| I-925 | Ac-PL3-Asp-Npg-B5-Asp-TfeGA-Ala-Ala-Phe-Asn-PyrS2-3C1F-BztA-Gln-NH2 | 642 |
| I-926 | Ac-PL3-Asp-Npg-B5-Asp-TfeGA-Ala-Ala-Phe-Asn-PyrS2-3C1F-BztA-Gln-NH2 | 642 |
| I-927 | Ac-PL3-Asp-Npg-B5-Asp-TfeGA-Ala-Ala-Phe-Asn-PyrS2-2F3MeF-BztA-Gln-NH2 | 643 |
| I-928 | Ac-PL3-Asp-Npg-B5-Asp-TfeGA-Ala-Ala-Phe-Asn-PyrS2-2F3MeF-BztA-Gln-NH2 | 643 |
| I-929 | Ac-PL3-Asp-Npg-B5-Asp-TfeGA-Ala-Ala-Phe-Asn-S8-2C1F-BztA-Gln-NH2 | 644 |
| I-930 | Ac-PL3-Asp-Npg-B5-Asp-TfeGA-Ala-Ala-Phe-Thr-S8-2C1F-BztA-Gln-NH2 | 645 |
| I-931 | Ac-PL3-Asp-Npg-B5-Asp-TfeGA-Ala-Ala-Phe-Phe-S8-2C1F-BztA-Gln-NH2 | 646 |
| I-932 | Ac-PL3-Asp-Npg-B5-Asp-TfeGA-Ala-Ala-Phe-Asn-S8-2BrF-BztA-Gln-NH2 | 647 |
| I-933 | Ac-PL3-Asp-Npg-B5-Asp-TfeGA-Ala-Ala-Phe-Asn-S8-3C1F-BztA-Gln-NH2 | 648 |
| I-934 | Ac-PL3-Asp-Npg-B5-Asp-TfeGA-Ala-Ala-Phe-Asn-S8-2F3MeF-BztA-Gln-NH2 | 649 |
| I-935 | Ac-PL3-Asp-Npg-B5-Asp-Asp-Ala-Ala-Phe-Asn-PyrS2-3Thi-BztA-Gln- | 650 |
| | [PropynPEG1]Lys-NH2 | |
| I-936 | Ac-PL3-Asp-Npg-B5-Asp-Asp-Ala-Ala-Phe-Asn-PyrS2-3Thi-BztA-Gln- | 651 |
| | [PropynPEG2]Lys-NH2 | |
| I-937 | Ac-PL3-Asp-Npg-B5-Asp-Asp-Ala-Ala-Phe-Asn-PyrS2-3Thi-BztA-Gln- | 652 |
| | [PropynPEG3]Lys-NH2 | |
| I-938 | Ac-PL3-Asp-Npg-B5-Asp-Asp-Ala-Ala-Phe-Asn-PyrS2-3Thi-BztA-Gln- | 653 |
| | [PropynPEG4]Lys-NH2 | |
| I-939 | Ac-PL3-Asp-Npg-B5-Asp-Asp-Ala-Ala-Phe-Asn-PyrS2-3Thi-BztA-Gln-Lys-NH2 | 654 |
| I-940 | Ac-PL3-Asp-Npg-B5-Asp-TfeGA-Ala-Ala-Phe-Asn-PyrS2-3Thi-BztA-Ser-NH2 | 655 |
| I-941 | Ac-PL3-Asp-Npg-B5-Asp-TfeGA-Ala-Ala-Phe-Asn-PyrS2-3Thi-BztA-Ser-NH2 | 655 |
| I-942 | Ac-PL3-Asp-Npg-B5-Asp-TfeGA-Ala-Ala-Phe-Asn-PyrS2-3Thi-BztA-Thr-NH2 | 656 |
| I-943 | Ac-PL3-Asp-Npg-B5-Asp-TfeGA-Ala-Ala-Phe-Asn-PyrS2-3Thi-BztA-Thr-NH2 | 656 |
| I-944 | Ac-PL3-Asp-Npg-B5-Asp-TfeGA-Ala-Ala-Phe-Asn-PyrS2-3Thi-BztA-Ala-NH2 | 657 |
| I-945 | Ac-PL3-Asp-Npg-B5-Asp-TfeGA-Ala-Ala-Phe-Asn-PyrS2-3Thi-BztA-Ala-NH2 | 657 |
| I-946 | Ac-PL3-Asp-Npg-B5-Asp-TfeGA-Ala-Ala-Phe-Asn-PyrS2-3Thi-BztA-Leu-NH2 | 658 |
| I-947 | Ac-PL3-Asp-Npg-B5-Asp-TfeGA-Ala-Ala-Phe-Asn-PyrS2-3Thi-BztA-Leu-NH2 | 658 |
| I-948 | Ac-PL3-Asp-Npg-B5-Asp-TfeGA-Ala-Ala-Phe-Asn-PyrS2-3Thi-BztA-dThr-NH2 | 659 |
| I-949 | Ac-PL3-Asp-Npg-B5-Asp-TfeGA-Ala-Ala-Phe-Asn-PyrS2-3Thi-BztA-dThr-NH2 | 659 |
| I-950 | Ac-PL3-Asp-Npg-B5-Asp-TfeGA-Ala-Ala-Phe-Asn-PyrS2-3Thi-BztA-Hse-NH2 | 660 |
| I-951 | Ac-PL3-Asp-Npg-B5-Asp-TfeGA-Ala-Ala-Phe-Asn-PyrS2-3Thi-BztA-Hse-NH2 | 660 |
| I-952 | Ac-PL3-Asp-Npg-B5-Asp-TfeGA-Ala-Ala-Phe-Asn-PyrS2-3Thi-BztA-Tyr-NH2 | 661 |
| I-953 | Ac-PL3-Asp-Npg-B5-Asp-TfeGA-Ala-Ala-Phe-Asn-PyrS2-3Thi-BztA-Tyr-NH2 | 661 |
| I-954 | Ac-PL3-Asp-Npg-B5-Asp-TfeGA-Ala-Ala-Phe-Ser-PyrS2-3Thi-BztA-Ser-NH2 | 662 |
| I-955 | Ac-PL3-Asp-Npg-B5-Asp-TfeGA-Ala-Ala-Phe-Ser-PyrS2-3Thi-BztA-Ser-NH2 | 662 |
| I-956 | Ac-PL3-Asp-Npg-B5-Asp-TfeGA-Ala-Ala-Phe-Thr-PyrS2-3Thi-BztA-Ser-NH2 | 663 |
| I-957 | Ac-PL3-Asp-Npg-B5-Asp-TfeGA-Ala-Ala-Phe-Thr-PyrS2-3Thi-BztA-Ser-NH2 | 663 |
| I-958 | Ac-PL3-Asp-Npg-B5-Asp-TfeGA-Ala-Ala-Phe-Hse-PyrS2-3Thi-BztA-Ser-NH2 | 664 |
| I-959 | Ac-PL3-Asp-Npg-B5-Asp-TfeGA-Ala-Ala-Phe-Hse-PyrS2-3Thi-BztA-Ser-NH2 | 664 |
| I-960 | Ac-PL3-Asp-Npg-B5-Asp-TfeGA-Ala-Ala-Phe-Leu-PyrS2-3Thi-BztA-Ser-NH2 | 665 |
| I-961 | Ac-PL3-Asp-Npg-B5-Asp-TfeGA-Ala-Ala-Phe-Leu-PyrS2-3Thi-BztA-Ser-NH2 | 665 |
| I-962 | Ac-PL3-Asp-Npg-B5-Asp-TfeGA-Ala-Ala-Phe-Phe-PyrS2-3Thi-BztA-Ser-NH2 | 666 |
| I-963 | Ac-PL3-Asp-Npg-B5-Asp-TfeGA-Ala-Ala-Phe-Phe-PyrS2-3Thi-BztA-Ser-NH2 | 666 |
| I-964 | Ac-PL3-Asp-Npg-B5-Asp-EtGA-Ala-Ala-Phe-Asn-PyrS2-3Thi-BztA-Gln-NH2 | 667 |
| I-965 | Ac-PL3-Asp-Npg-B5-Asp-EtGA-Ala-Ala-Phe-Asn-PyrS2-3Thi-BztA-Gln-NH2 | 667 |
| I-966 | Ac-PL3-Asp-Npg-B5-Asp-EtGA-Ala-Ala-Phe-Ser-PyrS2-3Thi-BztA-Gln-NH2 | 668 |
| I-967 | Ac-PL3-Asp-Npg-B5-Asp-EtGA-Ala-Ala-Phe-Ser-PyrS2-3Thi-BztA-Gln-NH2 | 668 |
| I-968 | Ac-PL3-Asp-Npg-B5-Asp-EtGA-Ala-Ala-Phe-Thr-PyrS2-3Thi-BztA-Gln-NH2 | 669 |
| I-969 | Ac-PL3-Asp-Npg-B5-Asp-EtGA-Ala-Ala-Phe-Thr-PyrS2-3Thi-BztA-Gln-NH2 | 669 |
| I-970 | Ac-PL3-Asp-Npg-B5-Asp-EtGA-Ala-Ala-Phe-Phe-PyrS2-3Thi-BztA-Gln-NH2 | 670 |
| I-971 | Ac-PL3-Asp-Npg-B5-Asp-EtGA-Ala-Ala-Phe-Phe-PyrS2-3Thi-BztA-Gln-NH2 | 670 |
| I-972 | Ac-PL3-Asp-Npg-B5-Asp-EtGA-Ala-Ala-Phe-Leu-PyrS2-3Thi-BztA-Gln-NH2 | 671 |
| I-973 | Ac-PL3-Asp-Npg-B5-Asp-EtGA-Ala-Ala-Phe-Leu-PyrS2-3Thi-BztA-Gln-NH2 | 671 |
| I-974 | Ac-PL3-Asp-Npg-B5-Asp-EtGA-Ala-Ala-Phe-Ser-PyrS2-3Thi-BztA-Ser-NH2 | 672 |
| I-975 | Ac-PL3-Asp-Npg-B5-Asp-EtGA-Ala-Ala-Phe-Ser-PyrS2-3Thi-BztA-Ser-NH2 | 672 |
| I-976 | Ac-PL3-Asp-Npg-B5-Asp-3COOHF-Ala-Ala-Phe-Asn-PyrS2-3Thi-BztA-Gln-NH2 | 673 |
| I-977 | Ac-PL3-Asp-Npg-B5-Asp-3COOHF-Ala-Ala-Phe-Asn-PyrS2-3Thi-BztA-Gln-NH2 | 673 |
| I-978 | Ac-PL3-Asp-Npg-B5-Asp-3COOHF-Ala-Ala-Phe-Ser-PyrS2-3Thi-BztA-Gln-NH2 | 674 |
| I-979 | Ac-PL3-Asp-Npg-B5-Asp-3COOHF-Ala-Ala-Phe-Ser-PyrS2-3Thi-BztA-Gln-NH2 | 674 |
| I-980 | Ac-PL3-Asp-Npg-B5-Asp-3COOHF-Ala-Ala-Phe-Thr-PyrS2-3Thi-BztA-Gln-NH2 | 675 |
| I-981 | Ac-PL3-Asp-Npg-B5-Asp-3COOHF-Ala-Ala-Phe-Thr-PyrS2-3Thi-BztA-Gln-NH2 | 675 |
| I-982 | Ac-PL3-Asp-Npg-B5-Asp-3COOHF-Ala-Ala-Phe-Phe-PyrS2-3Thi-BztA-Ser-NH2 | 676 |
| I-983 | Ac-PL3-Asp-Npg-B5-Asp-3COOHF-Ala-Ala-Phe-Phe-PyrS2-3Thi-BztA-Ser-NH2 | 676 |
| I-984 | Ac-PL3-Asp-Npg-B5-Asp-3COOHF-Ala-Ala-Phe-Ser-PyrS2-3Thi-BztA-Ser-NH2 | 677 |
| I-985 | Ac-PL3-Asp-Npg-B5-Asp-3COOHF-Ala-Ala-Phe-Ser-PyrS2-3Thi-BztA-Ser-NH2 | 677 |
| I-986 | Ac-PL3-Asp-Npg-B5-Asp-3COOHF-Ala-Ala-Phe-Leu-PyrS2-3Thi-BztA-Ser-NH2 | 678 |
| I-987 | Ac-PL3-Asp-Npg-B5-Asp-3COOHF-Ala-Ala-Phe-Leu-PyrS2-3Thi-BztA-Ser-NH2 | 678 |
| I-988 | Ac-PL3-Asp-Npg-B5-Asp-TfeGA-Ala-Ala-Phe-Phe-PyrS2-Phe-BztA-Gln-NH2 | 679 |
| I-989 | Ac-PL3-Asp-Npg-B5-Asp-TfeGA-Ala-Ala-Phe-Phe-PyrS2-Tyr-BztA-Gln-NH2 | 680 |
| I-990 | Ac-PL3-Asp-Npg-B5-Asp-TfeGA-Ala-Ala-Phe-Phe-PyrS2-2C1F-BztA-Ser-NH2 | 681 |
| I-991 | Ac-PL3-Asp-Npg-B5-Asp-TfeGA-Ala-Ala-Phe-Phe-PyrS2-2C1F-BztA-Thr-NH2 | 682 |
| I-992 | Ac-PL3-Asp-Npg-B5-Asp-TfeGA-Ala-Ala-Phe-Phe-PyrS2-2C1F-BztA-Hse-NH2 | 683 |
| I-993 | Ac-PL3-Asp-Npg-B5-Asp-TfeGA-Ala-Ala-Phe-Hse-PyrS2-2C1F-BztA-Hse-NH2 | 684 |
| I-994 | Ac-PL3-Asp-Npg-B5-Asp-TfeGA-Ala-Ala-Phe-Leu-S8-2C1F-BztA-Gln-NH2 | 685 |
| I-995 | Ac-PL3-Asp-Npg-B5-Asp-TfeGA-Ala-Ala-Phe-Ser-S8-2C1F-BztA-Gln-NH2 | 686 |
| I-996 | Ac-PL3-Asp-Npg-B5-Asp-TfeGA-Ala-Ala-Phe-Hse-S8-2C1F-BztA-Gln-NH2 | 687 |
| I-997 | Ac-PL3-Asp-Npg-B5-Asp-TfeGA-Ala-Ala-Phe-Leu-S8-2C1F-BztA-Hse-NH2 | 688 |
| I-998 | Ac-PL3-Asp-Npg-B5-Asp-TfeGA-Ala-Ala-Phe-Ser-S8-2C1F-BztA-Hse-NH2 | 689 |
| I-999 | Ac-PL3-Asp-Npg-B5-Asp-TfeGA-Ala-Ala-Phe-Ser-S8-2C1F-BztA-Hse-NH2 | 689 |
| I-1000 | Ac-PL3-Asp-Npg-B5-Asp-TfeGA-Ala-Ala-Phe-Hse-S8-2C1F-BztA-Hse-NH2 | 690 |
| I-1001 | Ac-PL3-Asp-Npg-B5-3Thi-TfeGA-Ala-Ala-Phe-Asn-PyrS2-Asp-BztA-Gln-NH2 | 691 |
| I-1002 | Ac-PL3-Asp-Npg-B5-Asp-TfeGA-Ala-Leu-Phe-Asn-PyrS2-2C1F-BztA-Gln-NH2 | 692 |
| I-1003 | Ac-PL3-Asp-Npg-B5-Asp-TfeGA-Ala-Phe-Phe-Asn-PyrS2-2C1F-BztA-Gln-NH2 | 693 |
| I-1004 | Ac-PL3-Asp-Npg-B5-Asp-TfeGA-Ala-Ser-Phe-Asn-PyrS2-2C1F-BztA-Gln-NH2 | 694 |
| I-1005 | Ac-PL3-Asp-Npg-B5-Asp-TfeGA-Ala-Ile-Phe-Asn-PyrS2-2C1F-BztA-Gln-NH2 | 695 |
| I-1006 | Ac-PL3-Asp-Npg-B5-Asp-TfeGA-Ala-Lys-Phe-Asn-PyrS2-2C1F-BztA-Gln-NH2 | 696 |
| I-1007 | Ac-PL3-Asp-Npg-B5-Asp-TfeGA-Leu-Ala-Phe-Asn-PyrS2-2C1F-BztA-Gln-NH2 | 697 |
| I-1008 | Ac-PL3-Asp-Npg-B5-Asp-TfeGA-Phe-Ala-Phe-Asn-PyrS2-2C1F-BztA-Gln-NH2 | 698 |
| I-1009 | Ac-PL3-Asp-Npg-B5-Asp-TfeGA-Ser-Ala-Phe-Asn-PyrS2-2C1F-BztA-Gln-NH2 | 699 |
| I-1010 | Ac-PL3-Asp-Npg-B5-Asp-TfeGA-Ile-Ala-Phe-Asn-PyrS2-2C1F-BztA-Gln-NH2 | 700 |
| I-1011 | Ac-PL3-Asp-Npg-B5-Asp-TfeGA-Lys-Ala-Phe-Asn-PyrS2-2C1F-BztA-Gln-NH2 | 701 |
| I-1012 | Ac-PL3-Asp-Npg-B5-Asp-TfeGA-Ala-Ala-Phe-Phe-PyrS2-2C1F-BztA-Gln-6AmHex | 702 |
| I-1013 | Ac-PL3-Asp-Npg-B5-Asp-Asp-Ala-Ala-Phe-Thr-PyrS2-2C1F-BztA-Gln-NH2 | 703 |
| I-1014 | Ac-PL3-Asp-Npg-B5-Asp-Asn-Ala-Ala-Phe-Thr-PyrS2-2C1F-BztA-Gln-NH2 | 704 |
| I-1015 | Ac-PL3-Asp-Npg-B5-Asp-Asp-Ala-Ala-Phe-Thr-PyrS2-2C1F-BztA-Ser-NH2 | 705 |
| I-1016 | Ac-PL3-Asp-Npg-B5-Asp-Asn-Ala-Ala-Phe-Thr-PyrS2-2ClF-BztA-Ser-NH2 | 706 |
| I-1017 | Ac-PL3-Asp-Npg-B5-Asp-Asp-Ala-Ala-Phe-Ser-PyrS2-2C1F-BztA-Gln-NH2 | 707 |
| I-1018 | Ac-PL3-Asp-Npg-B5-Asp-Asn-Ala-Ala-Phe-Ser-PyrS2-2C1F-BztA-Gln-NH2 | 708 |
| I-1019 | Ac-PL3-Asp-Npg-B5-Asp-Asp-Ala-Ala-Phe-Ser-PyrS2-2C1F-BztA-Ser-NH2 | 709 |
| I-1020 | Ac-PL3-Asp-Npg-B5-Asp-Asn-Ala-Ala-Phe-Ser-PyrS2-2C1F-BztA-Ser-NH2 | 710 |
| I-1021 | Ac-PL3-Asp-Npg-B5-Asp-Asp-Ala-Ala-Phe-Thr-PyrS2-2FF-BztA-Gln-NH2 | 711 |
| I-1022 | Ac-PL3-Asp-Npg-B5-Asp-Asn-Ala-Ala-Phe-Thr-PyrS2-2FF-BztA-Gln-NH2 | 712 |
| I-1023 | Ac-PL3-Asp-Npg-B5-Asp-Asp-Ala-Ala-Phe-Thr-PyrS2-2FF-BztA-Ser-NH2 | 713 |
| I-1024 | Ac-PL3-Asp-Npg-B5-Asp-Asn-Ala-Ala-Phe-Thr-PyrS2-2FF-BztA-Ser-NH2 | 714 |
| I-1025 | Ac-PL3-Asp-Npg-B5-Asp-Asp-Ala-Ala-Phe-Asn-PyrS2-3Thi-BztA-Gln-OH | 715 |
| I-1026 | Ac-PL3-Asp-Npg-B5-Asp-TfeGA-Ala-Ala-Phe-Asn-PyrS2-3Thi-BztA-Gln-OH | 716 |
| I-1027 | Ac-PL3-Phe-Npg-B5-Asp-Asp-Ala-Ala-Asp-Asn-PyrS2-3Thi-BztA-Gln-OH | 717 |
| I-1028 | Ac-PL3-Asp-Npg-B5-Asp-Asp-Ala-Ala-Phe-Asn-PyrS2-2C1F-BztA-dThr-NH2 | 718 |
| I-1029 | Ac-PL3-Glu-Npg-B5-Asp-Asp-Ala-Ala-Phe-Asn-PyrS2-2C1F-BztA-dThr-NH2 | 719 |
| I-1030 | Ac-PL3-Asp-Npg-B5-Glu-Asp-Ala-Ala-Phe-Asn-PyrS2-2C1F-BztA-dThr-NH2 | 720 |
| I-1031 | Ac-PL3-Asp-Npg-B5-Asp-Glu-Ala-Ala-Phe-Asn-PyrS2-2C1F-BztA-dThr-NH2 | 721 |
| I-1032 | Ac-PL3-Asp-Npg-B5-Asp-Asp-Ala-Ala-Phe-Ser-PyrS2-2C1F-BztA-dThr-NH2 | 722 |
| I-1033 | Ac-PL3-Asp-Npg-B5-Asp-Asp-Ala-Ala-Phe-Thr-PyrS2-2ClF-BztA-dThr-NH2 | 723 |
| I-1034 | Ac-PL3-Asp-Npg-B5-Asp-Asp-Ala-Ala-Phe-Phe-PyrS2-2C1F-BztA-dThr-NH2 | 724 |
| I-1035 | Ac-PL3-Asp-Npg-B5-Asp-Asp-Ala-Ala-Phe-Leu-PyrS2-2C1F-BztA-dThr-NH2 | 725 |
| I-1036 | Ac-PL3-Asp-Npg-B5-Asp-Glu-Ala-Ala-Phe-Ser-PyrS2-2C1F-BztA-dThr-NH2 | 726 |
| I-1037 | Ac-PL3-Asp-Npg-B5-Asp-Glu-Ala-Ala-Phe-Thr-PyrS2-2C1F-BztA-dThr-NH2 | 727 |
| I-1038 | Ac-PL3-Asp-Npg-B5-Asp-Glu-Ala-Ala-Phe-Phe-PyrS2-2C1F-BztA-dThr-NH2 | 728 |
| I-1039 | Ac-PL3-Asp-Npg-B5-Asp-Glu-Ala-Ala-Phe-Leu-PyrS2-2C1F-BztA-dThr-NH2 | 729 |
| I-1040 | Ac-PL3-Asp-Cha-B5-Asp-Asp-Ala-Ala-Phe-Asn-PyrS2-2C1F-BztA-Gln-NH2 | 730 |
| I-1041 | Ac-PL3-Asp-Phe-B5-Asp-Asp-Ala-Ala-Phe-Asn-PyrS2-2C1F-BztA-Gln-NH2 | 731 |
| I-1042 | Ac-PL3-Asp-Cha-B5-Asp-Asp-Ala-Ala-Phe-Thr-PyrS2-2C1F-BztA-Gln-NH2 | 732 |
| I-1043 | Ac-PL3-Asp-Phe-B5-Asp-Asp-Ala-Ala-Phe-Thr-PyrS2-2C1F-BztA-Gln-NH2 | 733 |
| I-1044 | Ac-PL3-Asp-Cha-B5-Asp-Asp-Ala-Ala-Phe-Ser-PyrS2-2C1F-BztA-Gln-NH2 | 734 |
| I-1045 | Ac-PL3-Asp-Phe-B5-Asp-Asp-Ala-Ala-Phe-Ser-PyrS2-2C1F-BztA-Gln-NH2 | 735 |
| I-1046 | Ac-PL3-Asp-Cha-B5-Asp-Asp-Ala-Ala-Phe-Asn-PyrS2-2C1F-BztA-Ser-NH2 | 736 |
| I-1047 | Ac-PL3-Asp-Phe-B5-Asp-Asp-Ala-Ala-Phe-Asn-PyrS2-2C1F-BztA-Ser-NH2 | 737 |
| I-1048 | Ac-PL3-Asp-Cha-B5-Asp-Asp-Ala-Ala-Phe-Thr-PyrS2-2C1F-BztA-Ser-NH2 | 738 |
| I-1049 | Ac-PL3-Asp-Phe-B5-Asp-Asp-Ala-Ala-Phe-Thr-PyrS2-2C1F-BztA-Ser-NH2 | 739 |
| I-1050 | Ac-PL3-Asp-Cha-B5-Asp-Asp-Ala-Ala-Phe-Ser-PyrS2-2C1F-BztA-Ser-NH2 | 740 |
| I-1051 | Ac-PL3-Asp-Phe-B5-Asp-Asp-Ala-Ala-Phe-Ser-PyrS2-2C1F-BztA-Ser-NH2 | 741 |
| I-1052 | AzAc-PL3-Asp-Npg-B5-Asp-Asp-Ala-Ala-Phe-Asn-S8-3Thi-BztA-Gln-NH2 | 742 |
| I-1053 | AzAc-PL3-Asp-Npg-B5-Asp-Asp-Ala-Ala-Phe-Asn-S8-3Thi-BztA-Gln-NH2 | 742 |
| I-1054 | AzAc-PL3-Asp-Npg-B5-Asp-TfeGA-Ala-Ala-Phe-Asn-PyrS2-3Thi-BztA-Gln-NH2 | 743 |
| I-1055 | AzAc-PL3-Asp-Npg-B5-Asp-Asp-Ala-Ala-Phe-Asn-PyrS2-Phe-BztA-His-NH2 | 744 |
| I-1056 | AzAc-PL3-Asp-Npg-B5-3Thi-TfeGA-Ala-Ala-Phe-Asn-PyrS2-Asp-BztA-Gln-NH2 | 745 |
| I-1057 | AzAc-PL3-Asp-Npg-B5-3Thi-TfeGA-Ala-Ala-Phe-Asn-PyrS2-Asp-BztA-Gln-NH2 | 745 |
| I-1058 | AzAc-PL3-Asp-Npg-B5-Asp-Asp-Ala-Ala-Phe-Asn-PyrS2-3Thi-BztA-dThr-NH2 | 746 |
| I-1059 | AzAc-PL3-Asp-Npg-B5-Asp-TfeGA-Ala-Ala-Phe-Thr-PyrS2-2C1F-BztA-Gln-NH2 | 747 |
| I-1060 | AzAc-PL3-Asp-Npg-B5-Asp-Asp-Ala-Ala-Phe-Thr-PyrS2-2C1F-BztA-dThr-NH2 | 748 |
| I-1061 | Ac-PL3-Asp-Npg-B5-Asp-TfeGA-Ala-Ala-Phe-Thr-PyrS2-2C1F-BztA-Gln-6AmHex | 749 |
| I-1062 | Ac-PL3-Asp-Npg-B5-Asp-Asp-Ala-Ala-Phe-Leu-PyrS2-2C1F-BztA-Gln-NH2 | 750 |
| I-1063 | Ac-PL3-Asp-Npg-B5-Asp-Glu-Ala-Ala-Phe-Leu-PyrS2-2C1F-BztA-Gln-NH2 | 751 |
| I-1064 | Ac-PL3-Asp-Npg-B5-Asp-Asp-Ala-Ala-Phe-Leu-PyrS2-2C1F-BztA-Ser-NH2 | 752 |
| I-1065 | Ac-PL3-Asp-Npg-B5-Asp-Asp-Ala-Ala-Phe-Leu-PyrS2-2C1F-BztA-Ser-NH2 | 752 |
| I-1066 | Ac-PL3-Asp-Npg-B5-Asp-Glu-Ala-Ala-Phe-Leu-PyrS2-2C1F-BztA-Ser-NH2 | 753 |
| I-1067 | Ac-PL3-Asp-Npg-B5-Asp-Glu-Ala-Ala-Phe-Leu-PyrS2-2C1F-BztA-Ser-NH2 | 753 |
| I-1068 | Ac-PL3-Asp-Npg-B5-Asp-Asp-Ala-Ala-Phe-Leu-PyrS2-2C1F-BztA-Thr-NH2 | 754 |
| I-1069 | Ac-PL3-Asp-Npg-B5-Asp-Asp-Ala-Ala-Phe-Leu-PyrS2-2C1F-BztA-Thr-NH2 | 754 |
| I-1070 | Ac-PL3-Asp-Npg-B5-Asp-Glu-Ala-Ala-Phe-Leu-PyrS2-2C1F-BztA-Thr-NH2 | 755 |
| I-1071 | Ac-PL3-Asp-Npg-B5-Asp-Glu-Ala-Ala-Phe-Leu-PyrS2-2C1F-BztA-Thr-NH2 | 755 |
| I-1072 | Ac-PL3-Asp-Npg-B5-Asp-Asp-Ala-Ala-Phe-Leu-PyrS2-Phe-BztA-Gln-NH2 | 756 |
| I-1073 | Ac-PL3-Asp-Npg-B5-Asp-Glu-Ala-Ala-Phe-Leu-PyrS2-Phe-BztA-Gln-NH2 | 757 |
| I-1074 | Ac-PL3-Asp-Npg-B5-Asp-Glu-Ala-Ala-Phe-Leu-PyrS2-Phe-BztA-Gln-NH2 | 757 |
| I-1075 | Ac-PL3-Asp-Cha-B5-Asp-Asp-Ala-Ala-Phe-Leu-PyrS2-2C1F-BztA-Gln-NH2 | 758 |
| I-1076 | Ac-PL3-Asp-Cha-B5-Asp-Asp-Ala-Ala-Phe-Leu-PyrS2-2C1F-BztA-Gln-NH2 | 758 |
| I-1077 | Ac-PL3-Asp-Cha-B5-Asp-Glu-Ala-Ala-Phe-Leu-PyrS2-2C1F-BztA-Gln-NH2 | 759 |
| I-1078 | Ac-PL3-Asp-Cha-B5-Asp-Glu-Ala-Ala-Phe-Leu-PyrS2-2C1F-BztA-Gln-NH2 | 759 |
| I-1079 | Ac-PL3-Asp-Npg-B5-Asp-Asp-Ala-Ala-Phe-Asn-PyrS2-2C1F-BztA-Gln-NHEt | 760 |
| I-1080 | Ac-PL3-Asp-Npg-B5-Asp-Asp-Ala-Ala-Phe-Asn-PyrS2-2C1F-BztA-Leuo1 | 761 |
| I-1081 | Ac-PL3-Asp-Npg-B5-Asp-Asp-Ala-Ala-Phe-Asn-PyrS2-2C1F-BztA-Alao1 | 762 |
| I-1082 | Ac-PL3-Asp-Npg-B5-Asp-Asp-Ala-Ala-Phe-Asn-PyrS2-2C1F-BztA-Thro1 | 763 |
| I-1083 | Ac-PL3-Asp-Npg-B5-Asp-Asp-Ala-Ala-Phe-Asn-PyrS2-2C1F-BztA-Pheo1 | 764 |
| I-1084 | Ac-PL3-Asp-Npg-B5-Asp-Asp-Ala-Ala-Phe-Asn-PyrS2-2C1F-BztA-Proo1 | 765 |
| I-1085 | Ac-PL3-Asp-Npg-B5-Asp-TfeGA-Ala-Ala-Phe-Phe-PyrS2-2C1F-BztA-Gln-6AzHex | 766 |
| I-1086 | Ac-PL3-Asp-Npg-B5-Asp-Asp-Ala-Ala-Phe-Thr-S8-2C1F-BztA-Gln-NH2 | 767 |
| I-1087 | Ac-PL3-Asp-Npg-B5-Asp-Asp-Ala-Ala-Phe-Thr-S8-2C1F-BztA-Gln-NH2 | 767 |
| I-1088 | Ac-PL3-Asp-Npg-B5-Asp-Glu-Ala-Ala-Phe-Thr-S8-2ClF-BztA-Gln-NH2 | 768 |
| I-1089 | Ac-PL3-Asp-Npg-B5-Asp-Glu-Ala-Ala-Phe-Thr-S8-2C1F-BztA-Gln-NH2 | 768 |
| I-1090 | Ac-PL3-Asp-Npg-B5-Asp-Asp-Ala-Ala-Phe-Thr-S8-2C1F-BztA-Thr-NH2 | 769 |
| I-1091 | Ac-PL3-Asp-Npg-B5-Asp-Glu-Ala-Ala-Phe-Thr-S8-2C1F-BztA-Thr-NH2 | 770 |
| I-1092 | Ac-PL3-Asp-Npg-B5-Asp-Asp-Ala-Ala-Phe-Thr-S8-2C1F-BztA-dThr-NH2 | 771 |
| I-1093 | Ac-PL3-Asp-Npg-B5-Asp-Glu-Ala-Ala-Phe-Thr-S8-2C1F-BztA-dThr-NH2 | 772 |
| I-1094 | Ac-PL3-Asp-Npg-B5-Asp-Glu-Ala-Ala-Phe-Thr-S8-2C1F-BztA-dThr-NH2 | 772 |
| I-1095 | Ac-PL3-Asp-Npg-B5-Asp-Asp-Ala-Ala-Phe-Leu-S8-2C1F-BztA-Gln-NH2 | 773 |
| I-1096 | Ac-PL3-Asp-Npg-B5-Asp-Glu-Ala-Ala-Phe-Leu-S8-2C1F-BztA-Gln-NH2 | 774 |
| I-1097 | Ac-PL3-Asp-Npg-B5-Asp-Asp-Ala-Ala-Phe-Leu-S8-2C1F-BztA-dThr-NH2 | 775 |
| I-1098 | Ac-PL3-Asp-Npg-B5-Asp-Glu-Ala-Ala-Phe-Leu-S8-2ClF-BztA-dThr-NH2 | 776 |
| I-1099 | Ac-PL3-Asp-Npg-B5-Asp-Asp-Ala-Ala-Phe-Ser-PyrS2-Phe-BztA-Ser-NH2 | 777 |
| I-1100 | Ac-PL3-Asp-Cha-B5-Asp-Asp-Ala-Ala-Phe-Ser-PyrS2-Phe-BztA-Ser-NH2 | 778 |
| I-1101 | Ac-PL3-Asp-Npg-B5-Asp-Asp-Ala-Ala-Phe-Ser-PyrS2-2FF-BztA-Ser-NH2 | 779 |
| I-1102 | Ac-PL3-Asp-Cha-B5-Asp-Asp-Ala-Ala-Phe-Ser-PyrS2-2FF-BztA-Ser-NH2 | 780 |
| I-1103 | Ac-PL3-Asp-Npg-B5-Asp-Asp-Ala-Ala-Phe-Ser-PyrS2-2OMeF-BztA-Ser-NH2 | 781 |
| I-1104 | Ac-PL3-Asp-Cha-B5-Asp-Asp-Ala-Ala-Phe-Ser-PyrS2-2OMeF-BztA-Ser-NH2 | 782 |
| I-1105 | Ac-PL3-Asp-Npg-B5-Asp-Asp-Ala-Ala-Cha-Ser-PyrS2-Phe-BztA-Ser-NH2 | 783 |
| I-1106 | Ac-PL3-Asp-Npg-B5-Asp-Asp-Ala-Ala-Phe-Ser-PyrS2-Cha-BztA-Ser-NH2 | 784 |
| I-1107 | Ac-PL3-Asp-Cha-B5-Asp-Asp-Ala-Ala-Phe-Cha-PyrS2-2C1F-BztA-Gln-NH2 | 785 |
| I-1108 | Ac-PL3-Asp-1NapA-B5-Asp-Asp-Ala-Ala-Phe-Ser-PyrS2-2C1F-BztA-Gln-NH2 | 786 |
| I-1109 | Ac-PL3-Asp-2NapA-B5-Asp-Asp-Ala-Ala-Phe-Ser-PyrS2-2C1F-BztA-Gln-NH2 | 787 |
| I-1110 | Ac-PL3-Asp-1NapA-B5-Asp-Asp-Ala-Ala-Phe-Leu-PyrS2-2C1F-BztA-Gln-NH2 | 788 |
| I-1111 | Ac-PL3-Asp-2NapA-B5-Asp-Asp-Ala-Ala-Phe-Leu-PyrS2-2C1F-BztA-Gln-NH2 | 789 |
| I-1112 | Ac-PL3-Asp-Cha-B5-Asp-Asp-Ala-Ala-Phe-Leu-PyrS2-2C1F-BztA-Ser-NH2 | 790 |
| I-1113 | Ac-PL3-Asp-Cha-B5-Asp-Asp-Ala-Ala-Phe-Cha-PyrS2-2C1F-BztA-Ser-NH2 | 791 |
| I-1114 | Ac-PL3-Asp-1NapA-B5-Asp-Asp-Ala-Ala-Phe-Thr-PyrS2-2C1F-BztA-Ser-NH2 | 792 |
| I-1115 | Ac-PL3-Asp-2NapA-B5-Asp-Asp-Ala-Ala-Phe-Thr-PyrS2-2C1F-BztA-Ser-NH2 | 793 |
| I-1116 | Ac-PL3-Asp-1NapA-B5-Asp-Asp-Ala-Ala-Phe-Leu-PyrS2-2C1F-BztA-Ser-NH2 | 794 |
| I-1117 | Ac-PL3-Asp-2NapA-B5-Asp-Asp-Ala-Ala-Phe-Leu-PyrS2-2C1F-BztA-Ser-NH2 | 795 |
| I-1118 | Ac-PL3-Asp-Cha-B5-Asp-Asp-Ala-Ala-3OMeF-Ser-PyrS2-2C1F-BztA-Gln-NH2 | 796 |
| I-1119 | Ac-PL3-Asp-Cha-B5-Asp-Asp-Ala-Ala-3F3MeF-Ser-PyrS2-2C1F-BztA-Gln-NH2 | 797 |
| I-1120 | Ac-PL3-Asp-Cha-B5-Asp-Asp-Ala-Ala-4F3MeF-Ser-PyrS2-2C1F-BztA-Gln-NH2 | 798 |
| I-1121 | Ac-PL3-Asp-Npg-B5-Asp-Asp-Ala-Ala-3OMeF-Leu-PyrS2-2C1F-BztA-Gln-NH2 | 799 |
| I-1122 | Ac-PL3-Asp-Npg-B5-Asp-Asp-Ala-Ala-3F3MeF-Leu-PyrS2-2C1F-BztA-Gln-NH2 | 800 |
| I-1123 | Ac-PL3-Asp-Npg-B5-Asp-Asp-Ala-Ala-4F3MeF-Leu-PyrS2-2C1F-BztA-Gln-NH2 | 801 |
| I-1124 | Ac-PL3-Asp-Cha-B5-Asp-Asp-Ala-Ala-3OMeF-Ser-PyrS2-Phe-BztA-Gln-NH2 | 802 |
| I-1125 | Ac-PL3-Asp-Cha-B5-Asp-Asp-Ala-Ala-3F3MeF-Ser-PyrS2-Phe-BztA-Gln-NH2 | 803 |
| I-1126 | Ac-PL3-Asp-Cha-B5-Asp-Asp-Ala-Ala-4F3MeF-Ser-PyrS2-Phe-BztA-Gln-NH2 | 804 |
| I-1127 | Ac-PL3-Asp-Npg-B5-Asp-Asp-Ala-Ala-3OMeF-Leu-PyrS2-Phe-BztA-Gln-NH2 | 805 |
| I-1128 | Ac-PL3-Asp-Npg-B5-Asp-Asp-Ala-Ala-3F3MeF-Leu-PyrS2-Phe-BztA-Gln-NH2 | 806 |
| I-1129 | Ac-PL3-Asp-Npg-B5-Asp-Asp-Ala-Ala-4F3MeF-Leu-PyrS2-Phe-BztA-Gln-NH2 | 807 |
| I-1130 | Ac-PL3-Asp-Npg-B5-Asp-Asp-Ala-Ala-Phe-Asn-PyrS2-2C1F-BztA-iPrLys-NH2 | 808 |
| I-1131 | Ac-PL3-Asp-Npg-B5-Asp-Asp-iPrLys-Ala-Phe-Asn-PyrS2-2C1F-BztA-Gln-NH2 | 809 |
| I-1132 | Ac-PL3-Asp-Npg-B5-Asp-Asp-Ala-iPrLys-Phe-Asn-PyrS2-2C1F-BztA-Gln-NH2 | 810 |
| I-1133 | Ac-PL3-Asp-Npg-B5-Asp-Asp-Ala-Ala-Phe-Asn-PyrS2-2C1F-BztA-MorphAla-NH2 | 811 |
| I-1134 | Ac-PL3-Asp-Npg-B5-Asp-Asp-Ala-Ala-Phe-Asn-PyrS2-2C1F-BztA-MorphAla-NH2 | 811 |
| I-1135 | Ac-PL3-Asp-Cha-B5-Asp-Asp-Ala-Ala-Phe-Ser-PyrS2-2C1F-BztA-Thr-NH2 | 812 |
| I-1136 | Ac-PL3-Asp-Cha-B5-Asp-Asp-Ala-Ala-Phe-Ser-PyrS2-2C1F-BztA-dThr-NH2 | 813 |
| I-1137 | Ac-PL3-Asp-Cha-B5-Asp-Asp-Ala-Ala-Phe-Ser-PyrS2-2C1F-BztA-Hse-NH2 | 814 |
| I-1138 | Ac-PL3-Asp-Cha-B5-Asp-Asp-Ala-Ala-Phe-Ser-PyrS2-2C1F-BztA-Leu-NH2 | 815 |
| I-1139 | Ac-PL3-Asp-Cha-B5-Asp-Asp-Ala-Ala-Phe-Leu-PyrS2-2C1F-BztA-Thr-NH2 | 816 |
| I-1140 | Ac-PL3-Asp-Cha-B5-Asp-Asp-Ala-Ala-Phe-Leu-PyrS2-2C1F-BztA-dThr-NH2 | 817 |
| I-1141 | Ac-PL3-Asp-Phe-B5-Asp-Asp-Ala-Ala-Phe-Ser-PyrS2-2C1F-BztA-Thr-NH2 | 818 |
| I-1142 | Ac-PL3-Asp-Phe-B5-Asp-Asp-Ala-Ala-Phe-Ser-PyrS2-2C1F-BztA-dThr-NH2 | 819 |
| I-1143 | Ac-PL3-Asp-Phe-B5-Asp-Asp-Ala-Ala-Phe-Ser-PyrS2-2C1F-BztA-Hse-NH2 | 820 |
| I-1144 | Ac-PL3-Asp-Phe-B5-Asp-Asp-Ala-Ala-Phe-Ser-PyrS2-2C1F-BztA-Leu-NH2 | 821 |
| I-1145 | Ac-PL3-Asp-Phe-B5-Asp-Asp-Ala-Ala-Phe-Leu-PyrS2-2C1F-BztA-Thr-NH2 | 822 |
| I-1146 | Ac-PL3-Asp-Phe-B5-Asp-Asp-Ala-Ala-Phe-Leu-PyrS2-2C1F-BztA-dThr-NH2 | 823 |
| I-1147 | Ac-PL3-Asp-Cha-B5-Asp-Asp-Leu-Ala-Phe-Ser-PyrS2-2C1F-BztA-Gln-NH2 | 824 |
| I-1148 | Ac-PL3-Asp-Cha-B5-Asp-Asp-Ala-Leu-Phe-Ser-PyrS2-2C1F-BztA-Gln-NH2 | 825 |
| I-1149 | Ac-PL3-Asp-Cha-B5-Asp-Asp-Leu-Leu-Phe-Ser-PyrS2-2C1F-BztA-Gln-NH2 | 826 |
| I-1150 | Ac-PL3-Asp-Cha-B5-Asp-Asp-Leu-Ala-Phe-Thr-PyrS2-2C1F-BztA-Ser-NH2 | 827 |
| I-1151 | Ac-PL3-Asp-Cha-B5-Asp-Asp-Ala-Leu-Phe-Thr-PyrS2-2C1F-BztA-Ser-NH2 | 828 |
| I-1152 | Ac-PL3-Asp-Cha-B5-Asp-Asp-Leu-Leu-Phe-Thr-PyrS2-2C1F-BztA-Ser-NH2 | 829 |
| I-1153 | Ac-PL3-Asp-Phe-B5-Asp-Asp-Leu-Ala-Phe-Ser-PyrS2-2C1F-BztA-Gln-NH2 | 830 |
| I-1154 | Ac-PL3-Asp-Phe-B5-Asp-Asp-Ala-Leu-Phe-Ser-PyrS2-2C1F-BztA-Gln-NH2 | 831 |
| I-1155 | Ac-PL3-Asp-Phe-B5-Asp-Asp-Leu-Leu-Phe-Ser-PyrS2-2C1F-BztA-Gln-NH2 | 832 |
| I-1156 | Ac-PL3-Asp-Phe-B5-Asp-Asp-Leu-Ala-Phe-Thr-PyrS2-2C1F-BztA-Ser-NH2 | 833 |
| I-1157 | Ac-PL3-Asp-Phe-B5-Asp-Asp-Ala-Leu-Phe-Thr-PyrS2-2C1F-BztA-Ser-NH2 | 834 |
| I-1158 | Ac-PL3-Asp-Phe-B5-Asp-Asp-Leu-Leu-Phe-Thr-PyrS2-2C1F-BztA-Ser-NH2 | 835 |
| I-1159 | Ac-PL3-RbGlu-Npg-B5-Asp-Asp-Ala-Ala-Phe-Asn-PyrS2-3Thi-BztA-Gln-NH2 | 836 |
| I-1160 | Ac-PL3-NMeD-Npg-B5-Asp-Asp-Ala-Ala-Phe-Asn-PyrS2-3Thi-BztA-Gln-NH2 | 837 |
| I-1161 | Ac-PL3-RbGlu-Npg-B5-Asp-TfeGA-Ala-Ala-Phe-Asn-PyrS2-3Thi-BztA-Gln-NH2 | 838 |
| I-1162 | Ac-PL3-NMeD-Npg-B5-Asp-TfeGA-Ala-Ala-Phe-Asn-PyrS2-3Thi-BztA-Gln-NH2 | 839 |
| I-1163 | Ac-PL3-RbGlu-Npg-B5-Asp-Asp-Ala-Ala-Phe-Asn-S8-3Thi-BztA-Gln-NH2 | 840 |
| I-1164 | Ac-PL3-RbGlu-Npg-B5-Asp-Asp-Ala-Ala-Phe-Asn-S8-3Thi-BztA-Gln-NH2 | 840 |
| I-1165 | Ac-PL3-NMeD-Npg-B5-Asp-Asp-Ala-Ala-Phe-Asn-S8-3Thi-BztA-Gln-NH2 | 841 |
| I-1166 | Ac-PL3-Asp-Npg-B5-Asp-Thr-Ala-Ala-Phe-Thr-PyrS2-3Thi-BztA-Gln-NH2 | 842 |
| I-1167 | Ac-PL3-Asp-Npg-B5-Asp-Thr-Ala-Ala-Phe-Leu-PyrS2-3Thi-BztA-Gln-NH2 | 843 |
| I-1168 | Ac-PL3-Asp-Npg-B5-Asp-Thr-Ala-Ala-Phe-Thr-PyrS2-2C1F-BztA-Gln-NH2 | 844 |
| I-1169 | Ac-PL3-Asp-Npg-B5-Asp-Thr-Ala-Ala-Phe-Leu-PyrS2-2C1F-BztA-Gln-NH2 | 845 |
| I-1170 | Ac-PL3-Asp-Npg-B5-Asp-Thr-Ala-Ala-Phe-Thr-PyrS2-3Thi-BztA-Ser-NH2 | 846 |
| I-1171 | Ac-PL3-Asp-Npg-B5-Asp-Thr-Ala-Ala-Phe-Leu-PyrS2-3Thi-BztA-Ser-NH2 | 847 |
| I-1172 | Ac-PL3-Asp-Npg-B5-Asp-Thr-Ala-Ala-Phe-Leu-PyrS2-2C1F-BztA-Ser-NH2 | 848 |
| I-1173 | Ac-PL3-Asp-Cha-B5-Asp-Thr-Ala-Ala-Phe-Thr-PyrS2-3Thi-BztA-Gln-NH2 | 849 |
| I-1174 | Ac-PL3-Asp-Cha-B5-Asp-Thr-Ala-Ala-Phe-Leu-PyrS2-3Thi-BztA-Gln-NH2 | 850 |
| I-1175 | Ac-PL3-Asp-Cha-B5-Asp-Thr-Ala-Ala-Phe-Thr-PyrS2-2C1F-BztA-Gln-NH2 | 851 |
| I-1176 | Ac-PL3-Asp-Cha-B5-Asp-Thr-Ala-Ala-Phe-Leu-PyrS2-2C1F-BztA-Gln-NH2 | 852 |
| I-1177 | Ac-PL3-Asp-Npg-B5-Asp-Asp-Aib-Ala-Phe-Leu-PyrS2-3Thi-BztA-Gln-NH2 | 853 |
| I-1178 | Ac-PL3-Asp-Npg-B5-Asp-Asp-Ala-Aib-Phe-Leu-PyrS2-3Thi-BztA-Gln-NH2 | 854 |
| I-1179 | Ac-PL3-Asp-Npg-B5-Asp-Asp-Aib-Aib-Phe-Leu-PyrS2-3Thi-BztA-Gln-NH2 | 855 |
| I-1180 | Ac-PL3-Asp-Npg-B5-Asp-Asp-Aib-Aib-Phe-Leu-PyrS2-3Thi-BztA-Gln-NH2 | 855 |
| I-1181 | Ac-Pro-Asp-Npg-R5-Asp-Asp-Ala-Ala-Phe-Leu-PyrS2-3Thi-BztA-Gln-NH2 | 856 |
| I-1182 | Ac-Pro-Asp-Npg-R5-Asp-Asp-Ala-Ala-Phe-Asn-PyrS2-3Thi-BztA-Gln-NH2 | 857 |
| I-1183 | Ac-Pro-Asp-Npg-R5-Asp-Asp-Ala-Ala-Phe-Asn-PyrS2-2C1F-BztA-Gln-NH2 | 858 |
| I-1184 | Ac-Pro-Asp-Cha-R5-Asp-Asp-Ala-Ala-Phe-Thr-PyrS2-2C1F-BztA-Ser-NH2 | 859 |
| I-1185 | Ac-PL3-Asp-Npg-B5-Asp-Asp-Ala-Ala-Phe-Leu-PyrS2-Pff-BztA-Gln-NH2 | 860 |
| I-1186 | Ac-PL3-Asp-Npg-B5-Asp-Asp-Ala-Ala-Phe-Asn-PyrS2-Pff-BztA-Gln-NH2 | 861 |
| I-1187 | Ac-PL3-Asp-Cha-B5-Asp-Asp-Ala-Ala-Phe-Thr-PyrS2-Pff-BztA-Ser-NH2 | 862 |
| I-1188 | Ac-PL3-Asp-Npg-B5-Asp-Asp-Ala-Ala-Phe-Leu-S8-3Thi-BztA-Gln-NH2 | 863 |
| I-1189 | Ac-PL3-Asp-Npg-B5-Asp-Asp-Ala-Ala-Phe-Leu-S8-2C1F-BztA-Ser-NH2 | 864 |
| I-1190 | Ac-PL3-Asp-Npg-B5-Asp-Asp-Ala-Ala-Phe-Leu-S8-3Thi-BztA-Ser-NH2 | 865 |
| I-1191 | Ac-PL3-Asp-Npg-B5-Asp-Asp-Ala-Ala-Phe-Leu-S8-3Thi-BztA-Thr-NH2 | 866 |
| I-1192 | Ac-PL3-Asp-Npg-B5-Asp-Asp-Ala-Ala-Phe-Leu-S8-2C1F-BztA-4TriA-NH2 | 867 |
| I-1193 | Ac-PL3-Asp-Npg-B5-Asp-Asp-Ala-Ala-Phe-Leu-S8-3Thi-BztA-4TriA-NH2 | 868 |
| I-1194 | Ac-PL3-Asp-Npg-B5-Asp-Asp-Ala-Ala-Phe-Leu-S8-2C1F-BztA-His-NH2 | 869 |
| I-1195 | Ac-PL3-Asp-Npg-B5-Asp-Asp-Ala-Ala-Phe-Leu-S8-3Thi-BztA-His-NH2 | 870 |
| I-1196 | Ac-PL3-Asp-Npg-B5-Asp-Asp-Ala-Ala-Phe-Leu-S8-2C1F-BztA-Hse-NH2 | 871 |
| I-1197 | Ac-PL3-Asp-Npg-B5-Asp-Asp-Ala-Ala-Phe-Leu-S8-3Thi-BztA-Hse-NH2 | 872 |
| I-1198 | Ac-PL3-Asp-Npg-B5-Asp-Asp-Ala-Ala-Phe-Leu-S8-2C1F-BztA-dGln-NH2 | 873 |
| I-1199 | Ac-PL3-Asp-Npg-B5-Asp-Asp-Ala-Ala-Phe-Leu-S8-3Thi-BztA-dGln-NH2 | 874 |
| I-1200 | Ac-PL3-Asp-Npg-B5-Asp-Asp-Ala-Ala-2CNF-Leu-PyrS2-3Thi-BztA-Gln-NH2 | 875 |
| I-1201 | Ac-PL3-Asp-Npg-B5-Asp-Asp-Ala-Ala-3CNF-Leu-PyrS2-3Thi-BztA-Gln-NH2 | 876 |
| I-1202 | Ac-PL3-Asp-Npg-B5-Asp-Asp-Ala-Ala-4CNF-Leu-PyrS2-3Thi-BztA-Gln-NH2 | 877 |
| I-1203 | Ac-PL3-Asp-Npg-B5-Asp-Asp-Ala-Ala-Phe-Leu-PyrS2-2CNF-BztA-Gln-NH2 | 878 |
| I-1204 | Ac-PL3-Asp-Npg-B5-Asp-Asp-Ala-Ala-Phe-Leu-PyrS2-3CNF-BztA-Gln-NH2 | 879 |
| I-1205 | Ac-PL3-Asp-Npg-B5-Asp-Asp-Ala-Ala-Phe-Leu-PyrS2-4CNF-BztA-Gln-NH2 | 880 |
| I-1206 | Ac-PL3-Asp-Npg-B5-Asn-Asp-Ala-Ala-Phe-Asn-PyrS2-3Thi-BztA-Gln-NH2 | 881 |
| I-1207 | Ac-PL3-Asp-Npg-B5-Asn-Asp-Ala-Ala-Phe-Leu-PyrS2-3Thi-BztA-Gln-NH2 | 882 |
| I-1208 | Ac-PL3-Asp-Npg-B5-Ser-Asp-Ala-Ala-Phe-Asn-PyrS2-3Thi-BztA-Gln-NH2 | 883 |
| I-1209 | Ac-PL3-Asp-Npg-B5-Ser-Asp-Ala-Ala-Phe-Leu-PyrS2-3Thi-BztA-Gln-NH2 | 884 |
| I-1210 | Ac-PL3-Asp-Npg-B5-Gln-Asp-Ala-Ala-Phe-Asn-PyrS2-3Thi-BztA-Gln-NH2 | 885 |
| I-1211 | Ac-PL3-Asp-Npg-B5-Gln-Asp-Ala-Ala-Phe-Leu-PyrS2-3Thi-BztA-Gln-NH2 | 886 |
| I-1212 | Ac-PL3-Asp-Npg-B5-Leu-Asp-Ala-Ala-Phe-Asn-PyrS2-3Thi-BztA-Gln-NH2 | 887 |
| I-1213 | Ac-PL3-Asp-Npg-B5-Leu-Asp-Ala-Ala-Phe-Leu-PyrS2-3Thi-BztA-Gln-NH2 | 888 |
| I-1214 | Ac-PL3-Asp-Npg-B5-Hse-Asp-Ala-Ala-Phe-Asn-PyrS2-3Thi-BztA-Gln-NH2 | 889 |
| I-1215 | Ac-PL3-Asp-Npg-B5-Hse-Asp-Ala-Ala-Phe-Leu-PyrS2-3Thi-BztA-Gln-NH2 | 890 |
| I-1216 | Ac-PL3-Asp-Npg-B5-Dab-Asp-Ala-Ala-Phe-Asn-PyrS2-3Thi-BztA-Gln-NH2 | 891 |
| I-1217 | Ac-PL3-Asp-Npg-B5-Dab-Asp-Ala-Ala-Phe-Leu-PyrS2-3Thi-BztA-Gln-NH2 | 892 |
| I-1218 | MeSO2-PL3-Asp-Npg-B5-Asp-Asp-Ala-Ala-Phe-Asn-PyrS2-3Thi-BztA-Gln-NH2 | 893 |
| I-1219 | MeSO2-PL3-Asp-Npg-B5-Asp-TfeGA-Ala-Ala-Phe-Asn-PyrS2-3Thi-BztA-Gln-NH2 | 894 |
| I-1220 | Ac-PL3-Asn-Npg-B5-Asp-Asp-Ala-Ala-Phe-Asn-PyrS2-3Thi-BztA-Gln-NH2 | 895 |
| I-1221 | Ac-PL3-Asn-Npg-B5-Asp-Asp-Ala-Ala-Phe-Leu-PyrS2-3Thi-BztA-Gln-NH2 | 896 |
| I-1222 | Ac-PL3-Ser-Npg-B5-Asp-Asp-Ala-Ala-Phe-Asn-PyrS2-3Thi-BztA-Gln-NH2 | 897 |
| I-1223 | Ac-PL3-Ser-Npg-B5-Asp-Asp-Ala-Ala-Phe-Leu-PyrS2-3Thi-BztA-Gln-NH2 | 898 |
| I-1224 | Ac-PL3-Gln-Npg-B5-Asp-Asp-Ala-Ala-Phe-Asn-PyrS2-3Thi-BztA-Gln-NH2 | 899 |
| I-1225 | Ac-PL3-Gln-Npg-B5-Asp-Asp-Ala-Ala-Phe-Leu-PyrS2-3Thi-BztA-Gln-NH2 | 900 |
| I-1226 | Ac-PL3-Leu-Npg-B5-Asp-Asp-Ala-Ala-Phe-Asn-PyrS2-3Thi-BztA-Gln-NH2 | 901 |
| I-1227 | Ac-PL3-Leu-Npg-B5-Asp-Asp-Ala-Ala-Phe-Leu-PyrS2-3Thi-BztA-Gln-NH2 | 902 |
| I-1228 | Ac-PL3-Hse-Npg-B5-Asp-Asp-Ala-Ala-Phe-Asn-PyrS2-3Thi-BztA-Gln-NH2 | 903 |
| I-1229 | Ac-PL3-Hse-Npg-B5-Asp-Asp-Ala-Ala-Phe-Leu-PyrS2-3Thi-BztA-Gln-NH2 | 904 |
| I-1230 | Ac-PL3-Dab-Npg-B5-Asp-Asp-Ala-Ala-Phe-Asn-PyrS2-3Thi-BztA-Gln-NH2 | 905 |
| I-1231 | Ac-PL3-Dab-Npg-B5-Asp-Asp-Ala-Ala-Phe-Leu-PyrS2-3Thi-BztA-Gln-NH2 | 906 |
| I-1232 | Ac-PL3-Asp-Npg-B5-Asp-Asp-Ala-Ala-Phe-Thr-PyrS2-3Thi-1NapA-Gln-NH2 | 907 |
| I-1233 | Ac-PL3-Asp-Npg-B5-Asp-Asp-Ala-Ala-Phe-Thr-PyrS2-3Thi-2NapA-Gln-NH2 | 908 |
| I-1234 | Ac-PL3-Asp-Npg-B5-Asp-Asp-Ala-Ala-Phe-Leu-PyrS2-3Thi-1NapA-Gln-NH2 | 909 |
| I-1235 | Ac-PL3-Asp-Npg-B5-Asp-Asp-Ala-Ala-Phe-Leu-PyrS2-3Thi-2NapA-Gln-NH2 | 910 |
| I-1236 | Ac-PL3-Asp-Npg-B5-Asp-Asp-Ala-Ala-Phe-Leu-PyrS2-2C1F-1NapA-Gln-NH2 | 911 |
| I-1237 | Ac-PL3-Asp-Npg-B5-Asp-Asp-Ala-Ala-Phe-Leu-PyrS2-2C1F-2NapA-Gln-NH2 | 912 |
| I-1238 | Ac-PL3-Asp-Npg-B5-Asp-Asp-Ala-Ala-Phe-Leu-PyrS2-3Thi-1NapA-Ser-NH2 | 913 |
| I-1239 | Ac-PL3-Asp-Npg-B5-Asp-Asp-Ala-Ala-Phe-Leu-PyrS2-3Thi-2NapA-Ser-NH2 | 914 |
| I-1240 | Ac-PL3-Asp-Npg-B5-Asp-TfeGA-Ala-Ala-Phe-Thr-PyrS2-2C1F-BztA-Gln-NHEt | 915 |
| I-1241 | Ac-PL3-Asp-Npg-B5-Asp-TfeGA-Ala-Ala-Phe-Thr-PyrS2-2C1F-BztA-Thro1 | 916 |
| I-1242 | Ac-PL3-Asp-Npg-B5-Asp-TfeGA-Ala-Ala-Phe-Thr-PyrS2-2C1F-BztA-Alao1 | 917 |
| I-1243 | Ac-PL3-Asp-Npg-B5-Asp-TfeGA-Ala-Ala-Phe-Thr-PyrS2-2C1F-BztA-Leuo1 | 918 |
| I-1244 | Ac-PL3-Asp-Npg-B5-Asp-Asp-Ala-Ala-Phe-Thr-PyrS2-2C1F-BztA-Ser-NHEt | 919 |
| I-1245 | Ac-PL3-Asp-Npg-B5-Asp-Asp-Ala-Ala-Phe-Thr-PyrS2-2C1F-BztA-Thro1 | 920 |
| I-1246 | Ac-PL3-Asp-Npg-B5-Asp-Asp-Ala-Ala-Phe-Thr-PyrS2-2C1F-BztA-Alao1 | 921 |
| I-1247 | Ac-PL3-Asp-Npg-B5-Asp-Asp-Ala-Ala-Phe-Thr-PyrS2-2C1F-BztA-Leuo1 | 922 |
| I-1248 | Ac-PL3-Asp-Npg-B5-Asp-Asp-Ala-Ala-Phe-Leu-PyrS2-2C1F-BztA-Gln-NHEt | 923 |
| I-1249 | Ac-PL3-Asp-Npg-B5-Asp-Asp-Ala-Ala-Phe-Leu-PyrS2-2C1F-BztA-Thro1 | 924 |
| I-1250 | Ac-PL3-Asp-Npg-B5-Asp-Asp-Ala-Ala-Phe-Leu-PyrS2-2C1F-BztA-Alao1 | 925 |
| I-1251 | Ac-PL3-Asp-Npg-B5-Asp-Asp-Ala-Ala-Phe-Leu-PyrS2-2C1F-BztA-Leuo1 | 926 |
| I-1252 | Oct-PL3-Asp-Npg-B5-Asp-Asp-Ala-Ala-Phe-Asn-PyrS2-2C1F-BztA-dThr-NH2 | 927 |
| I-1253 | mPEG2-PL3-Asp-Npg-B5-Asp-Asp-Ala-Ala-Phe-Asn-PyrS2-2C1F-BztA-dThr-NH2 | 928 |
| I-1254 | Oct-PL3-Asp-Npg-B5-Asp-Asp-Ala-Ala-Phe-Thr-S8-2C1F-BztA-Gln-NH2 | 929 |
| I-1255 | mPEG2-PL3-Asp-Npg-B5-Asp-Asp-Ala-Ala-Phe-Thr-S8-2C1F-BztA-Gln-NH2 | 930 |
| I-1256 | Ac-PL3-Asp-Npg-B5-Asp-Asp-Ala-Ala-Phe-Asn-PyrS1-2C1F-BztA-dThr-NH2 | 931 |
| I-1257 | Ac-PL3-Asp-Npg-B5-Asp-Asp-Ala-Ala-Phe-Asn-PyrS2-3Thi-BztA-Gln-NHBn | 932 |
| I-1258 | MeSO2-PL3-Asp-Npg-B5-Asp-Asp-Ala-Ala-Phe-Asn-PyrS2-2C1F-BztA-dThr-NH2 | 933 |
| I-1259 | MeOPr-PL3-Asp-Npg-B5-Asp-Asp-Ala-Ala-Phe-Asn-PyrS2-2C1F-BztA-dThr-NH2 | 934 |
| I-1260 | MeSO2-PL3-Asp-Npg-B5-Asp-Asp-Ala-Ala-Phe-Thr-S8-2C1F-BztA-Gln-NH2 | 935 |
| I-1261 | MeOPr-PL3-Asp-Npg-B5-Asp-Asp-Ala-Ala-Phe-Thr-S8-2C1F-BztA-Gln-NH2 | 936 |
| I-1262 | Ac-PL3-Asp-Npg-B5-Asp-Asp-Ala-Ala-Phe-Thr-S10-2C1F-BztA-Thr-NH2 | 937 |
| I-1263 | Ac-PL3-Asp-Npg-B5-Asp-Thr-Ala-Ala-Phe-Thr-PyrS2-Phe-BztA-Ser-NH2 | 938 |
| I-1264 | Ac-PL3-Asp-Npg-B5-Asp-Thr-Leu-Ala-Phe-Thr-PyrS2-Phe-BztA-Ser-NH2 | 939 |
| I-1265 | Ac-PL3-Asp-Npg-B5-Asp-Thr-Ala-Leu-Phe-Thr-PyrS2-Phe-BztA-Ser-NH2 | 940 |
| I-1266 | Ac-PL3-Asp-Npg-B5-Asp-Thr-Ala-Ala-1NapA-Thr-PyrS2-Phe-BztA-Ser-NH2 | 941 |
| I-1267 | Ac-PL3-Asp-Npg-B5-Asp-Thr-Ala-Ala-2NapA-Thr-PyrS2-Phe-BztA-Ser-NH2 | 942 |
| I-1268 | Ac-PL3-Asp-Npg-B5-Asp-Thr-Ala-Ala-3F3MeF-Thr-PyrS2-Phe-BztA-Ser-NH2 | 943 |
| I-1269 | Ac-PL3-Asp-Npg-B5-Asp-Thr-Ala-Ala-Phe-Thr-PyrS2-1NapA-BztA-Ser-NH2 | 944 |
| I-1270 | Ac-PL3-Asp-Npg-B5-Asp-Thr-Ala-Ala-Phe-Thr-PyrS2-2NapA-BztA-Ser-NH2 | 945 |
| I-1271 | Ac-PL3-Asp-Npg-B5-Asp-Thr-Ala-Ala-Phe-Thr-PyrS2-3F3MeF-BztA-Ser-NH2 | 946 |
| I-1272 | Ac-PL3-Asp-Npg-B5-Asp-Thr-Ala-Ala-Phe-Thr-PyrS2-Phe-1NapA-Ser-NH2 | 947 |
| I-1273 | Ac-PL3-Asp-Npg-B5-Asp-Asp-iPrLys-Ala-Phe-Thr-PyrS2-2C1F-BztA-Thr-NH2 | 948 |
| I-1274 | Ac-PL3-Asp-Npg-B5-Asp-Asp-iPrLys-Ala-Phe-Thr-PyrS2-2C1F-BztA-Leu-NH2 | 949 |
| I-1275 | Ac-PL3-Asp-Npg-B5-Asp-Asp-iPrLys-Ala-Phe-Leu-PyrS2-2C1F-BztA-Gln-NH2 | 950 |
| I-1276 | Ac-PL3-Asp-Npg-B5-Asp-Asp-iPrLys-Ala-Phe-Leu-PyrS2-2C1F-BztA-Thr-NH2 | 951 |
| I-1277 | Ac-PL3-Asp-Npg-B5-Asp-Asp-iPrLys-Ala-Phe-Leu-PyrS2-2C1F-BztA-Leu-NH2 | 952 |
| I-1278 | Ac-PL3-Asp-Npg-B5-Asp-Asp-Ala-Ala-Phe-iPrLys-PyrS2-2C1F-BztA-Gln-NH2 | 953 |
| I-1279 | Ac-PL3-Asp-Npg-B5-Asp-Asp-Ala-Ala-Phe-iPrLys-PyrS2-2C1F-BztA-Thr-NH2 | 954 |
| I-1280 | Ac-PL3-Asp-Npg-B5-Asp-Asp-Ala-Ala-Phe-iPrLys-PyrS2-2C1F-BztA-Leu-NH2 | 955 |
| I-1281 | Ac-PL3-Asp-Npg-B5-Asp-Glu-Ala-Ala-Phe-iPrLys-PyrS2-2C1F-BztA-Gln-NH2 | 956 |
| I-1282 | Ac-PL3-Asp-Npg-B5-Asp-Glu-Ala-Ala-Phe-iPrLys-PyrS2-2C1F-BztA-Thr-NH2 | 957 |
| I-1283 | Ac-PL3-Asp-Npg-B5-Asp-Glu-Ala-Ala-Phe-iPrLys-PyrS2-2C1F-BztA-Leu-NH2 | 958 |
| I-1284 | Ac-PL3-Asn-Npg-B5-Asp-Thr-Ala-Ala-Phe-Leu-PyrS2-Phe-BztA-Gln-NH2 | 959 |
| I-1285 | Ac-PL3-Asn-Npg-B5-Asp-Thr-Ala-Ala-Phe-Leu-PyrS2-Phe-BztA-Gln-NH2 | 959 |
| I-1286 | Ac-PL3-Asn-Ala-B5-Asp-Thr-Ala-Ala-Phe-Leu-PyrS2-Phe-BztA-Gln-NH2 | 960 |
| I-1287 | Ac-PL3-Asn-Ala-B5-Asp-Thr-Ala-Ala-Phe-Leu-PyrS2-Phe-BztA-Gln-NH2 | 960 |
| I-1288 | Ac-PL3-Asn-Npg-B5-Asp-Thr-iPrLys-Ala-Phe-Leu-PyrS2-Phe-BztA-Gln-NH2 | 961 |
| I-1289 | Ac-PL3-Asn-Npg-B5-Asp-Thr-iPrLys-Ala-Phe-Leu-PyrS2-Phe-BztA-Gln-NH2 | 961 |
| I-1290 | Ac-PL3-Asn-Npg-B5-Asp-Thr-Ala-Ala-Phe-Leu-PyrS2-Phe-1NapA-Gln-NH2 | 962 |
| I-1291 | Ac-PL3-Asn-Npg-B5-Asp-Thr-Ala-Ala-Phe-Leu-PyrS2-Phe-2NapA-Gln-NH2 | 963 |
| I-1292 | Ac-PL3-Asn-Npg-B5-Asp-Thr-Ala-Ala-Phe-Leu-PyrS2-Phe-2NapA-Gln-NH2 | 963 |
| I-1293 | Ac-PL3-Asn-Npg-B5-Asp-Thr-Ala-Ala-Phe-Leu-PyrS2-Phe-BztA-Thr-NH2 | 964 |
| I-1294 | Ac-PL3-Asp-Npg-B5-Asn-Thr-Ala-Ala-Phe-Leu-PyrS2-Phe-BztA-Gln-NH2 | 965 |
| I-1295 | Ac-PL3-Asp-Ala-B5-Asn-Thr-Ala-Ala-Phe-Leu-PyrS2-Phe-BztA-Gln-NH2 | 966 |
| I-1296 | Ac-PL3-Asp-Ala-B5-Asn-Thr-Ala-Ala-Phe-Leu-PyrS2-Phe-BztA-Gln-NH2 | 966 |
| I-1297 | Ac-PL3-Asp-Npg-B5-Asn-Thr-iPrLys-Ala-Phe-Leu-PyrS2-Phe-BztA-Gln-NH2 | 967 |
| I-1298 | Ac-PL3-Asp-Npg-B5-Asn-Thr-Ala-Ala-Phe-Leu-PyrS2-Phe-1NapA-Gln-NH2 | 968 |
| I-1299 | Ac-PL3-Asp-Npg-B5-Asn-Thr-Ala-Ala-Phe-Leu-PyrS2-Phe-BztA-Thr-NH2 | 969 |
| I-1300 | Ac-PL3-Asp-Npg-B5-Asn-Thr-Ala-Ala-Phe-Leu-PyrS2-Phe-BztA-Thr-NH2 | 969 |
| I-1301 | Ac-PL3-Asn-Npg-B5-Asn-Thr-Ala-Ala-Phe-Leu-PyrS2-Phe-BztA-Gln-NH2 | 970 |
| I-1302 | Ac-PL3-Asp-Npg-B5-Asp-Asp-Ala-Ala-Phe-Leu-PyrS2-3Thi-BztA-Thro1 | 971 |
| I-1303 | Ac-PL3-Asp-Npg-B5-Asp-Asp-Ala-Ala-Phe-Phe-PyrS2-3Thi-BztA-Thro1 | 972 |
| I-1304 | Ac-PL3-Asn-Npg-B5-Asp-Asp-Ala-Ala-Phe-Leu-PyrS2-3Thi-BztA-Thro1 | 973 |
| I-1305 | Ac-PL3-Asp-Npg-B5-Asp-Asp-Ala-Ala-Phe-Hse-PyrS2-3Thi-BztA-Thro1 | 974 |
| I-1306 | Ac-PL3-Asp-Npg-B5-Asp-Asp-Ala-Ala-Phe-Thr-PyrS2-3Thi-BztA-Thro1 | 975 |
| I-1307 | Ac-PL3-Asp-Cha-B5-Asp-Asp-Ala-Ala-Phe-Leu-PyrS2-2C1F-BztA-Thro1 | 976 |
| I-1308 | Ac-PL3-Asp-Npg-B5-Asp-Asp-Ala-Ala-Phe-Thr-S8-2C1F-BztA-Thro1 | 977 |
| I-1309 | Ac-PL3-Asp-Npg-B5-Asp-Thr-Ala-Ala-Phe-Thr-PyrS2-2C1F-BztA-Thro1 | 978 |
| I-1310 | Ac-PL3-Asp-Cha-B5-Asp-Thr-Ala-Ala-Phe-Thr-PyrS2-2ClF-BztA-Thro1 | 979 |
| I-1311 | Ac-PL3-Asp-Npg-B5-Asp-Asp-Ala-Ala-Phe-Phe-PyrS2-2C1F-BztA-Thro1 | 980 |
| I-1312 | Ac-PL3-Asp-Cha-B5-Asp-Asp-Ala-Ala-Phe-Thr-PyrS2-2C1F-BztA-Thro1 | 981 |
| I-1313 | Ac-PL3-Asp-Npg-B5-Asp-Asp-iPrLys-Ala-Phe-Leu-PyrS2-2C1F-BztA-Thro1 | 982 |
| I-1314 | Ac-PL3-Asp-Npg-B5-Asp-Asp-Ala-Ala-Phe-Asn-PyrS2-2cbmF-BztA-Gln-NH2 | 983 |
| I-1315 | Ac-PL3-Asp-Npg-B5-Asp-Asp-Ala-Ala-Phe-Leu-PyrS2-2cbmF-BztA-Gln-NH2 | 984 |
| I-1316 | Ac-PL3-Asp-Npg-B5-Asp-Asp-Ala-Ala-Phe-Phe-PyrS2-2cbmF-BztA-Gln-NH2 | 985 |
| I-1317 | Ac-PL3-Asp-Npg-B5-Asp-Asp-Ala-Ala-Phe-Asn-PyrS2-2F3MeF-BztA-Gln-NH2 | 986 |
| I-1318 | Ac-PL3-Asp-Npg-B5-Asp-Asp-Ala-Ala-Phe-Leu-PyrS2-2F3MeF-BztA-Gln-NH2 | 987 |
| I-1319 | Ac-PL3-Asp-Npg-B5-Asp-Asp-Ala-Ala-Phe-Phe-PyrS2-2F3MeF-BztA-Gln-NH2 | 988 |
| I-1320 | Ac-PL3-Asp-Npg-B5-Asp-Asp-Ala-Ala-Phe-Asn-PyrS2-2FF-BztA-Gln-NH2 | 989 |
| I-1321 | Ac-PL3-Asp-Npg-B5-Asp-Asp-Ala-Ala-Phe-Leu-PyrS2-2FF-BztA-Gln-NH2 | 990 |
| I-1322 | Ac-PL3-Asp-Npg-B5-Asp-Asp-Ala-Ala-Phe-Phe-PyrS2-2FF-BztA-Gln-NH2 | 991 |
| I-1323 | Ac-PL3-Asp-Npg-B5-Asp-Asp-Ala-Ala-Phe-Asn-PyrS2-2BrF-BztA-Gln-NH2 | 992 |
| I-1324 | PL3-Asp-Npg-B5-Asp-Asp-Ala-Ala-Phe-Leu-PyrS2-2BrF-BztA-Gln-NH2 | 993 |
| I-1325 | PL3-Asp-Npg-B5-Asp-Asp-Ala-Ala-Phe-Phe-PyrS2-2BrF-BztA-Gln-NH2 | 994 |
| I-1326 | PL3-Asp-Npg-B5-Asp-Asp-Ala-Ala-Phe-Phe-PyrS2-2MeF-BztA-Gln-NH2 | 995 |
| I-1327 | PL3-Asp-Npg-B5-Asp-Asp-Ala-Ala-Phe-Leu-PyrS2-2OMeF-BztA-Gln-NH2 | 996 |
| I-1328 | PL3-Asp-Npg-B5-Asp-Asp-Ala-Ala-Phe-Phe-PyrS2-2OMeF-BztA-Gln-NH2 | 997 |
| I-1329 | PL3-Asp-Npg-B5-Asp-Asp-Ala-Ala-Phe-Asn-PyrS2-Cha-BztA-Gln-NH2 | 998 |
| I-1330 | PL3-Asp-Npg-B5-Asp-Asp-Ala-Ala-Phe-Leu-PyrS2-Cha-BztA-Gln-NH2 | 999 |
| I-1331 | PL3-Asp-Npg-B5-Asp-Asp-Ala-Ala-Phe-Phe-PyrS2-Cha-BztA-Gln-NH2 | 1000 |
| I-1332 | PL3-Asp-Npg-B5-Asp-3COOHF-Ala-Ala-Phe-Leu-PyrS2-2C1F-BztA-Gln-NH2 | 1001 |
| I-1333 | PL3-Asp-Npg-B5-Asp-3COOHF-Ala-Ala-Phe-Leu-PyrS2-2C1F-BztA-Ser-NH2 | 1002 |
| I-1334 | PL3-Asp-Npg-B5-Asp-3COOHF-Ala-Ala-Phe-Leu-PyrS2-2C1F-BztA-Thro1 | 1003 |
| I-1335 | PL3-Asp-Npg-B5-Asp-3COOHF-Ala-Ala-Phe-Leu-PyrS2-2F3MeF-BztA-Gln-NH2 | 1004 |
| I-1336 | PL3-Asp-Npg-B5-Asp-3COOHF-Ala-Ala-Phe-Leu-PyrS2-2F3MeF-BztA-Ser-NH2 | 1005 |
| I-1337 | PL3-Asp-Npg-B5-Asp-3COOHF-Ala-Ala-Phe-Leu-PyrS2-2F3MeF-BztA-Thro1 | 1006 |
| I-1338 | PL3-Asp-Npg-B5-Asp-3COOHF-Ala-Ala-Phe-Phe-PyrS2-2C1F-BztA-Gln-NH2 | 1007 |
| I-1339 | PL3-Asp-Npg-B5-Asp-3COOHF-Ala-Ala-Phe-Phe-PyrS2-2C1F-BztA-Ser-NH2 | 1008 |
| I-1340 | PL3-Asp-Npg-B5-Asp-3COOHF-Ala-Ala-Phe-Phe-PyrS2-2C1F-BztA-Thro1 | 1009 |
| I-1341 | PL3-Asp-Npg-B5-Asp-3COOHF-Ala-Ala-Phe-Phe-PyrS2-2F3MeF-BztA-Gln-NH2 | 1010 |
| I-1342 | PL3-Asp-Npg-B5-Asp-3COOHF-Ala-Ala-Phe-Phe-PyrS2-2F3MeF-BztA-Ser-NH2 | 1011 |
| I-1343 | Ac-PL3-Asp-Npg-B5-Asp-3COOHF-Ala-Ala-Phe-Phe-PyrS2-2F3MeF-BztA-Thro1 | 1012 |
| I-1344 | PL3-Asp-Npg-B5-Asp-Asp-Ala-Ala-Phe-Leu-PyrS2-2Thi-BztA-Gln-NH2 | 1013 |
| I-1345 | PL3-Asp-Npg-B5-Asp-Asp-Ala-Ala-Phe-Phe-PyrS2-2Thi-BztA-Gln-NH2 | 1014 |
| I-1346 | PL3-Asp-Npg-B5-Asp-Asp-Ala-Ala-Phe-Asn-PyrS2-dPhe-BztA-Gln-NH2 | 1015 |
| I-1347 | PL3-Asp-Npg-B5-Asp-Asp-Ala-Ala-Phe-Leu-PyrS2-dPhe-BztA-Gln-NH2 | 1016 |
| I-1348 | PL3-Asp-Npg-B5-Asp-Asp-Ala-Ala-Phe-Phe-PyrS2-dPhe-BztA-Gln-NH2 | 1017 |
| I-1349 | PL3-Asp-Npg-B5-Asp-Asp-Ala-Ala-Phe-Asn-PyrS2-hPhe-BztA-Gln-NH2 | 1018 |
| I-1350 | PL3-Asp-Npg-B5-Asp-Asp-Ala-Ala-Phe-Leu-PyrS2-hPhe-BztA-Gln-NH2 | 1019 |
| I-1351 | PL3-Asp-Npg-B5-Asp-Asp-Ala-Ala-Phe-Phe-PyrS2-hPhe-BztA-Gln-NH2 | 1020 |
| I-1352 | PL3-Asp-Npg-B5-Asp-Asp-Ala-Ala-Phe-Asn-PyrS2-CypA-BztA-Gln-NH2 | 1021 |
| I-1353 | PL3-Asp-Npg-B5-Asp-Asp-Ala-Ala-Phe-Leu-PyrS2-CypA-BztA-Gln-NH2 | 1022 |
| I-1354 | NdiMeButC-PL3-Asp-Npg-B5-Asp-Asp-Ala-Ala-Phe-Ser-PyrS2-Phe-BztA-Ser-NH2 | 1023 |
| I-1355 | Oct-PL3-Asp-Npg-B5-Asp-Asp-Ala-Ala-Phe-Ser-PyrS2-Phe-BztA-Ser-NH2 | 1024 |
| I-1356 | PL3-Asp-Npg-B5-Asp-Asp-Ala-Ala-Phe-Ser-PyrS2-Phe-BztA-Ser-NH2 | 1025 |
| I-1357 | PL3-Asp-Npg-B5-Asp-Asp-Ala-Ala-Phe-Ser-PyrS2-Phe-BztA-Ser-NH2 | 1025 |
| I-1358 | NdiMeButC-PL3-Asp-Npg-B5-Asp-Asp-Ala-Ala-Phe-Leu-PyrS2-Phe-BztA-Gln-NH2 | 1026 |
| I-1359 | NdiMeButC-PL3-Asp-Npg-B5-Asp-Asp-Ala-Ala-Phe-Leu-PyrS2-Phe-BztA-Gln-NH2 | 1026 |
| I-1360 | PL3-Asp-Npg-B5-Asp-Asp-Ala-Ala-Phe-Leu-PyrS2-Phe-BztA-Gln-NH2 | 1027 |
| I-1361 | PL3-Asp-Npg-B5-Asp-Asp-Ala-Ala-Phe-Leu-PyrS2-Phe-BztA-Gln-NH2 | 1027 |
| I-1362 | PL3-Asp-Npg-B5-Asp-Asp-Ala-Ala-Phe-Leu-PyrS2-Phe-BztA-Gln-NH2 | 1027 |
| I-1363 | Ac-PL3-Asp-Npg-B5-Asp-Asp-Ala-Ala-Phe-2F3MeF-PyrS2-3Thi-BztA-Gln-NH2 | 1028 |
| I-1364 | Ac-PL3-Asp-Npg-B5-Asp-Asp-Ala-Ala-Phe-3F3MeF-PyrS2-3Thi-BztA-Gln-NH2 | 1029 |
| I-1365 | Ac-PL3-Asp-Npg-B5-Asp-Asp-Ala-Ala-Phe-4F3MeF-PyrS2-3Thi-BztA-Gln-NH2 | 1030 |
| I-1366 | Ac-PL3-Asp-Npg-B5-Asp-Asp-Ala-Ala-Phe-Phe-PyrS2-2C1F-BztA-Gln-NH2 | 1031 |
| I-1367 | Ac-PL3-Asp-Npg-B5-Asp-Asp-Ala-Ala-Phe-2F3MeF-PyrS2-2C1F-BztA-Gln-NH2 | 1032 |
| I-1368 | Ac-PL3-Asp-Npg-B5-Asp-Asp-Ala-Ala-Phe-3F3MeF-PyrS2-2C1F-BztA-Gln-NH2 | 1033 |
| I-1369 | Ac-PL3-Asp-Npg-B5-Asp-Asp-Ala-Ala-Phe-4F3MeF-PyrS2-2C1F-BztA-Gln-NH2 | 1034 |
| I-1370 | Ac-PL3-Asp-Npg-B5-Asp-Asp-Ala-Ala-Phe-2F3MeF-PyrS2-3Thi-BztA-Thro1 | 1035 |
| I-1371 | Ac-PL3-Asp-Npg-B5-Asp-Asp-Ala-Ala-Phe-3F3MeF-PyrS2-3Thi-BztA-Thro1 | 1036 |
| I-1372 | Ac-PL3-Asp-Npg-B5-Asp-Asp-Ala-Ala-Phe-4F3MeF-PyrS2-3Thi-BztA-Thro1 | 1037 |
| I-1373 | PL3-Asp-Npg-B5-Asp-Asp-Ala-Ala-Phe-Asn-PyrS2-3Thi-BztA-Gln-NEt2 | 1038 |
| I-1374 | PL3-Asp-Npg-B5-Asp-Asp-Ala-Ala-Phe-Asn-PyrS2-3Thi-BztA-Gln-NHCyHe | 1039 |
| I-1375 | PL3-Asp-Npg-B5-Asp-Asp-Ala-Ala-Phe-Asn-PyrS2-3Thi-BztA-Gln-NHCyPr | 1040 |
| I-1376 | Ac-PL3-Asp-Ala-B5-Asn-Thr-iPrLys-Ala-Phe-Leu-PyrS2-Phe-BztA-Gln-NH2 | 1041 |
| I-1377 | Ac-PL3-Asp-Ala-B5-Asn-Thr-iPrLys-Ala-Phe-Leu-PyrS2-Phe-BztA-Lys-NH2 | 1042 |
| I-1378 | Ac-PL3-Asp-Ala-B5-Asn-Thr-iPrLys-Ala-Phe-Leu-PyrS2-Phe-BztA-Thr-NH2 | 1043 |
| I-1379 | Ac-PL3-Asp-Ala-B5-Asn-Gln-iPrLys-Ala-Phe-Leu-PyrS2-Phe-BztA-Gln-NH2 | 1044 |
| I-1380 | Ac-PL3-Asp-Ala-B5-Asn-Lys-iPrLys-Ala-Phe-Leu-PyrS2-Phe-BztA-Gln-NH2 | 1045 |
| I-1381 | Ac-PL3-Asp-Ala-B5-Asn-Thr-iPrLys-Ala-Phe-Leu-PyrS2-Phe-2NapA-Gln-NH2 | 1046 |
| I-1382 | Ac-PL3-Asn-Ala-B5-Asp-Thr-iPrLys-Ala-Phe-Leu-PyrS2-Phe-BztA-Gln-NH2 | 1047 |
| I-1383 | Ac-PL3-Asn-Ala-B5-Asp-Thr-iPrLys-Ala-Phe-Leu-PyrS2-Phe-BztA-Lys-NH2 | 1048 |
| I-1384 | Ac-PL3-Asn-Ala-B5-Asp-Thr-iPrLys-Ala-Phe-Leu-PyrS2-Phe-BztA-Thr-NH2 | 1049 |
| I-1385 | Ac-PL3-Asn-Ala-B5-Asp-Gln-iPrLys-Ala-Phe-Leu-PyrS2-Phe-BztA-Gln-NH2 | 1050 |
| I-1386 | Ac-PL3-Asn-Ala-B5-Asp-Lys-iPrLys-Ala-Phe-Leu-PyrS2-Phe-BztA-Gln-NH2 | 1051 |
| I-1387 | Ac-PL3-Asn-Ala-B5-Asp-Thr-iPrLys-Ala-Phe-Leu-PyrS2-Phe-2NapA-Gln-NH2 | 1052 |
| I-1388 | Ac-PL3-Asp-Npg-B5-Asp-Asp-Ala-Ala-Phe-Hse-S8-Phe-BztA-Gln-NH2 | 1053 |
| I-1389 | Ac-PL3-Asp-Npg-B5-Asp-Asp-Ala-Ala-Phe-Hse-S8-3Thi-BztA-Gln-NH2 | 1054 |
| I-1390 | Ac-PL3-Asp-Npg-B5-Asp-Asp-Ala-Ala-Phe-Hse-S8-3Thi-BztA-Thro1 | 1055 |
| I-1391 | Ac-PL3-Asp-Npg-B5-Asp-Asp-Ala-Ala-Phe-Asn-S8-2Thi-BztA-Gln-NH2 | 1056 |
| I-1392 | Ac-PL3-Asp-Npg-B5-Asp-Asp-Ala-Ala-Phe-Hse-S8-2Thi-BztA-Gln-NH2 | 1057 |
| I-1393 | Ac-PL3-Asp-Npg-B5-Asp-Asp-Ala-Ala-Phe-Hse-S8-2Thi-BztA-Thro1 | 1058 |
| I-1394 | Ac-PL3-Asp-Npg-B5-Asp-Asp-Ala-Ala-Phe-Asn-S8-2C1F-BztA-Gln-NH2 | 1059 |
| I-1395 | Ac-PL3-Asp-Npg-B5-Asp-Asp-Ala-Ala-Phe-Hse-S8-2C1F-BztA-Gln-NH2 | 1060 |
| I-1396 | Ac-PL3-Asp-Npg-B5-Asp-Asp-Ala-Ala-Phe-Asn-S8-2F3MeF-BztA-Gln-NH2 | 1061 |
| I-1397 | Ac-PL3-Asp-Npg-B5-Asp-Asp-Ala-Ala-Phe-Hse-S8-2F3MeF-BztA-Gln-NH2 | 1062 |
| I-1398 | Ac-PL3-Asp-Npg-B5-Asp-Asp-Ala-Ala-Phe-Hse-S8-2F3MeF-BztA-Thro1 | 1063 |
| I-1399 | Ac-PL3-Asp-Leu-B5-Asp-Asp-Ala-Ala-Phe-Leu-PyrS2-3Thi-BztA-Gln-NH2 | 1064 |
| I-1400 | Ac-PL3-Asp-nLeu-B5-Asp-Asp-Ala-Ala-Phe-Leu-PyrS2-3Thi-BztA-Gln-NH2 | 1065 |
| I-1401 | Ac-PL3-Asp-nLeu-B5-Asp-Asp-Ala-Ala-Phe-nLeu-PyrS2-3Thi-BztA-Gln-NH2 | 1066 |
| I-1402 | Ac-PL3-Asp-Leu-B5-Asp-Asp-Ala-Ala-Phe-Leu-PyrS2-Phe-BztA-Gln-NH2 | 1067 |
| I-1403 | Ac-PL3-Asp-nLeu-B5-Asp-Asp-Ala-Ala-Phe-Leu-PyrS2-Phe-BztA-Gln-NH2 | 1068 |
| I-1404 | Ac-PL3-Asp-Leu-B5-Asp-Asp-Ala-Ala-Phe-nLeu-PyrS2-Phe-BztA-Gln-NH2 | 1069 |
| I-1405 | Ac-PL3-Asp-nLeu-B5-Asp-Asp-Ala-Ala-Phe-nLeu-PyrS2-Phe-BztA-Gln-NH2 | 1070 |
| I-1406 | Ac-PL3-Asp-Leu-B5-Asp-3COOHF-Ala-Ala-Phe-Leu-PyrS2-3Thi-BztA-Gln-NH2 | 1071 |
| I-1407 | Ac-PL3-Asp-Leu-B5-Asp-3COOHF-Ala-Ala-Phe-nLeu-PyrS2-3Thi-BztA-Gln-NH2 | 1072 |
| I-1408 | Ac-PL3-Asp-nLeu-B5-Asp-3COOHF-Ala-Ala-Phe-nLeu-PyrS2-3Thi-BztA-Gln-NH2 | 1073 |
| I-1409 | Ac-PL3-Asp-Npg-B5-Asp-Asp-Ala-Ala-Phe-Leu-PyrS2-3Thi-BztA-Leu-NH2 | 1074 |
| I-1410 | Ac-PL3-Asp-Leu-B5-Asp-Asp-Ala-Ala-Phe-Leu-PyrS2-3Thi-BztA-Leu-NH2 | 1075 |
| I-1411 | Ac-PL3-Asp-nLeu-B5-Asp-Asp-Ala-Ala-Phe-Leu-PyrS2-3Thi-BztA-Leu-NH2 | 1076 |
| I-1412 | Ac-PL3-Asp-nLeu-B5-Asp-Asp-Ala-Ala-Phe-Leu-PyrS2-3Thi-BztA-Leu-NH2 | 1076 |
| I-1413 | Ac-PL3-Asp-Asn-B5-Asp-Asp-Ala-Ala-Phe-Leu-PyrS2-3Thi-BztA-Leu-NH2 | 1077 |
| I-1414 | Ac-PL3-Asp-Ser-B5-Asp-Asp-Ala-Ala-Phe-Leu-PyrS2-3Thi-BztA-Leu-NH2 | 1078 |
| I-1415 | Ac-PL3-Asp-Thr-B5-Asp-Asp-Ala-Ala-Phe-Leu-PyrS2-3Thi-BztA-Leu-NH2 | 1079 |
| I-1416 | Ac-PL3-Asp-Npg-B5-Asp-Asp-Ala-Ala-Phe-Leu-PyrS2-2C1F-BztA-Leu-NH2 | 1080 |
| I-1417 | Ac-PL3-Asp-Npg-B5-Asp-Asp-Ala-Ala-Phe-Leu-PyrS2-2C1F-BztA-Leu-NH2 | 1080 |
| I-1418 | Ac-PL3-Asp-Leu-B5-Asp-Asp-Ala-Ala-Phe-Leu-PyrS2-2C1F-BztA-Leu-NH2 | 1081 |
| I-1419 | Ac-PL3-Asp-Leu-B5-Asp-Asp-Ala-Ala-Phe-Leu-PyrS2-2C1F-BztA-Leu-NH2 | 1081 |
| I-1420 | Ac-PL3-Asp-nLeu-B5-Asp-Asp-Ala-Ala-Phe-Leu-PyrS2-2C1F-BztA-Leu-NH2 | 1082 |
| I-1421 | Ac-PL3-Asp-nLeu-B5-Asp-Asp-Ala-Ala-Phe-Leu-PyrS2-2C1F-BztA-Leu-NH2 | 1082 |
| I-1422 | Ac-PL3-Asp-Asn-B5-Asp-Asp-Ala-Ala-Phe-Leu-PyrS2-2C1F-BztA-Leu-NH2 | 1083 |
| I-1423 | Ac-PL3-Asp-Ser-B5-Asp-Asp-Ala-Ala-Phe-Leu-PyrS2-2C1F-BztA-Leu-NH2 | 1084 |
| I-1424 | Ac-PL3-Asp-Thr-B5-Asp-Asp-Ala-Ala-Phe-Leu-PyrS2-2C1F-BztA-Leu-NH2 | 1085 |
| I-1425 | Ac-PL3-Asp-Npg-B5-Asp-Asp-Ala-Ala-Phe-Leu-PyrS2-3Thi-23FF-Gln-NH2 | 1086 |
| I-1426 | Ac-PL3-Asp-Npg-B5-Asp-Asp-Ala-Ala-Phe-Leu-PyrS2-3Thi-23FF-Ser-NH2 | 1087 |
| I-1427 | Ac-PL3-Asp-Npg-B5-Asp-Asp-Ala-Ala-Phe-Leu-PyrS2-3Thi-34FF-Gln-NH2 | 1088 |
| I-1428 | Ac-PL3-Asp-Npg-B5-Asp-Asp-Ala-Ala-Phe-Leu-PyrS2-3Thi-34FF-Ser-NH2 | 1089 |
| I-1429 | Ac-PL3-Asp-Npg-B5-Asp-Asp-Ala-Ala-Phe-Leu-PyrS2-3Thi-34OMeF-Gln-NH2 | 1090 |
| I-1430 | Ac-PL3-Asp-Npg-B5-Asp-Asp-Ala-Ala-Phe-Leu-PyrS2-3Thi-34OMeF-Ser-NH2 | 1091 |
| I-1431 | Ac-PL3-Asp-Npg-B5-Asp-Asp-Ala-Ala-Phe-Leu-PyrS2-3Thi-Trp-Gln-NH2 | 1092 |
| I-1432 | Ac-PL3-Asp-Npg-B5-Asp-Asp-Ala-Ala-Phe-Leu-PyrS2-3Thi-Trp-Ser-NH2 | 1093 |
| I-1433 | Ac-PL3-Asp-Npg-B5-Asp-Asp-Ala-Ala-Phe-Leu-PyrS2-3Thi-1MeW-Gln-NH2 | 1094 |
| I-1434 | Ac-PL3-Asp-Npg-B5-Asp-Asp-Ala-Ala-Phe-Leu-PyrS2-3Thi-1MeW-Ser-NH2 | 1095 |
| I-1435 | Ac-PL3-Asp-Npg-B5-Asp-Asp-Ala-Ala-Phe-Leu-PyrS2-3Thi-6C1W-Gln-NH2 | 1096 |
| I-1436 | Ac-PL3-Asp-Npg-B5-Asp-Asp-Ala-Ala-Phe-Leu-PyrS2-3Thi-6C1W-Ser-NH2 | 1097 |
| I-1437 | Ac-PL3-Asp-Npg-B5-Asp-Glu-Ala-Ala-Phe-Leu-PyrS2-3Thi-BztA-Gln-NH2 | 1098 |
| I-1438 | Ac-PL3-Asp-Npg-B5-Asp-Aad-Ala-Ala-Phe-Leu-PyrS2-3Thi-BztA-Gln-NH2 | 1099 |
| I-1439 | Ac-PL3-Asp-Npg-B5-Asp-Trp-Ala-Ala-Phe-Leu-PyrS2-3Thi-BztA-Gln-NH2 | 1100 |
| I-1440 | Ac-PL3-Asp-Npg-B5-Asp-Gln-Ala-Ala-Phe-Leu-PyrS2-3Thi-BztA-Gln-NH2 | 1101 |
| I-1441 | Ac-PL3-Asp-Npg-B5-Asp-Phe-Ala-Ala-Phe-Leu-PyrS2-3Thi-BztA-Gln-NH2 | 1102 |
| I-1442 | Ac-PL3-Asp-Npg-B5-Asp-Val-Ala-Ala-Phe-Leu-PyrS2-3Thi-BztA-Gln-NH2 | 1103 |
| I-1443 | Ac-PL3-Asp-Npg-B5-Asp-Ser-Ala-Ala-Phe-Leu-PyrS2-3Thi-BztA-Gln-NH2 | 1104 |
| I-1444 | Ac-PL3-Asp-Npg-B5-Asp-Leu-Ala-Ala-Phe-Leu-PyrS2-3Thi-BztA-Gln-NH2 | 1105 |
| I-1445 | Ac-PL3-Asp-Npg-B5-Asp-1AcAW-Ala-Ala-Phe-Leu-PyrS2-3Thi-BztA-Gln-NH2 | 1106 |
| I-1446 | Ac-PL3-Asp-Npg-B5-Asp-[Tfb]GA-Ala-Ala-Phe-Asn-PyrS2-2C1F-BztA-Gln-NH2 | 1107 |
| I-1447 | Ac-PL3-Asp-Npg-B5-Asp-[Bn]GA-Ala-Ala-Phe-Asn-PyrS2-2C1F-BztA-Gln-NH2 | 1108 |
| I-1448 | Ac-PL3-Asp-Npg-B5-Asp-[Pfbn]GA-Ala-Ala-Phe-Asn-PyrS2-2C1F-BztA-Gln-NH2 | 1109 |
| I-1449 | Ac-PL3-Asp-Npg-B5-Asp-[Pfbn]GA-Ala-Ala-Phe-Asn-PyrS2-2C1F-BztA-Gln-NH2 | 1109 |
| I-1450 | Ac-PL3-Asp-Npg-B5-Asp-[Pfbn]GA-Ala-Ala-Phe-Asn-PyrS2-2C1F-BztA-Gln-NH2 | 1109 |
| I-1451 | Ac-PL3-Asp-Npg-B5-Asp-[iPr]GA-Ala-Ala-Phe-Asn-PyrS2-2C1F-BztA-Gln-NH2 | 1110 |
| I-1452 | Ac-PL3-Asp-Npg-B5-Asp-[iPr]GA-Ala-Ala-Phe-Asn-S8-3Thi-BztA-Gln-NH2 | 1111 |
| I-1453 | Ac-PL3-Asp-Npg-B5-Asp-[iPr]GA-Ala-Ala-Phe-Asn-S8-3Thi-BztA-Gln-NH2 | 1111 |
| I-1454 | Ac-PL3-Asp-Npg-B5-Asp-[Tfb]GA-Ala-Ala-Phe-Asn-S8-3Thi-BztA-Gln-NH2 | 1112 |
| I-1455 | Ac-PL3-Asp-Npg-B5-Asp-[Tfb]GA-Ala-Ala-Phe-Asn-S8-3Thi-BztA-Gln-NH2 | 1112 |
| I-1456 | Ac-PL3-Asp-Npg-B5-Asp-[Bn]GA-Ala-Ala-Phe-Asn-S8-3Thi-BztA-Gln-NH2 | 1113 |
| I-1457 | Ac-PL3-Asp-Npg-B5-Asp-[Tfp]Dap-Ala-Ala-Phe-Asn-PyrS2-2C1F-BztA-Gln-NH2 | 1114 |
| I-1458 | Ac-PL3-Asp-Leu-B5-Asp-Glu-Ala-Ala-Phe-Gln-S8-Phe-BztA-Gln-NH2 | 333 |
| I-1459 | Ac-PL3-Asp-Npg-B5-Asp-Asp-Ala-Ala-Phe-Gln-PyrS2-3Thi-BztA-His-NH2 | 501 |
| I-1460 | Ac-PL3-Asp-Npg-B5-Asp-Asp-Ala-Ala-Phe-Gln-PyrS2-3Thi-BztA-His-NH2 | 501 |
| I-1461 | Ac-PL3-Asp-Npg-B5-Asp-TfeGA-Ala-Ala-Phe-Leu-PyrS2-3Thi-BztA-Gln-NH2 | 571 |
| I-1462 | Ac-PL3-Asp-Npg-B5-Asp-3COOHF-Ala-Ala-Phe-Leu-PyrS2-3Thi-BztA-Gln-NH2 | 1115 |
| I-1463 | Ac-PL3-Asp-Npg-B5-Asp-TfeGA-Ala-Ala-Phe-Thr-PyrS2-2C1F-BztA-Gln-NH2 | 639 |
| I-1464 | Ac-PL3-Asp-Npg-B5-Asp-Asp-Ala-Ala-Phe-Asn-PyrS2-2C1F-BztA-Gln-NH2 | 510 |
| I-1465 | Ac-PL3-Asp-Npg-B5-Asn-Thr-iPrLys-Ala-Phe-Leu-PyrS2-Phe-BztA-Gln-NH2 | 967 |
| I-1466 | Ac-PL3-Asp-Npg-B5-Asp-3COOHF-Ala-Ala-Phe-Leu-PyrS2-2F3MeF-BztA-Gln-NH2 | 1116 |
| I-1467 | Ac-PL3-Asp-Npg-B5-Asp-Asp-[CH2NMe2]4SEF-Ala-Phe-Leu-PyrS2-Phe-BztA-Gln | 1117 |
| I-1468 | Ac-PL3-Asp-Npg-B5-Asp-Asp-Ala-Ala-[CH2NMe2]4SEF-Leu-PyrS2-Phe-BztA-Gln | 1118 |
| I-1469 | Ac-PL3-Asp-[lithocholate]-Lys-B5-Asp-Asp-Ala-Ala-Phe-Leu-PyrS2-3Thi-BztA-Gln- | 1119 |
| | NH2 | |
| I-1470 | Ac-PL3-Asp-[lithocholate-PEG2]-Lys-B5-Asp-Asp-Ala-Ala-Phe-Leu-PyrS2-3Thi- | 1120 |
| | BztA-Gln-NH2 | |
| I-1471 | Ac-PL3-Asp-[Me3AdamantC]-Lys-B5-Asp-Asp-Ala-Ala-Phe-Leu-PyrS2-3Thi-BztA- | 1121 |
| | Gln-NH2 | |
| I-1472 | Ac-PL3-Asp-[Me3AdamantC-PEG2]-Lys-B5-Asp-Asp-Ala-Ala-Phe-Leu-PyrS2-3Thi- | 1122 |
| | BztA-Gln-NH2 | |
| I-1473 | Ac-PL3-Asp-Npg-B5-Asp-Asp-Ala-[lithocholate]-Lys-Phe-Leu-PyrS2-3Thi-BztA-Gln- | 1123 |
| | NH2 | |
| I-1474 | Ac-PL3-Asp-Npg-B5-Asp-Asp-Ala-[lithocholate-PEG2]-Lys-Phe-Leu-PyrS2-3Thi- | 1124 |
| | BztA-Gln-NH2 | |
| I-1475 | Ac-PL3-Asp-Npg-B5-Asp-Asp-Ala-[Me3AdamantC]-Lys-Phe-Leu-PyrS2-3Thi-BztA- | 1125 |
| | Gln-NH2 | |
| I-1476 | Ac-PL3-Asp-Npg-B5-Asp-Asp-Ala-[Me3AdamantC-PEG2]-Lys-Phe-Leu-PyrS2-3Thi- | 1126 |
| | BztA-Gln-NH2 | |
| I-1477 | Ac-PL3-Asp-Npg-B5-Asp-Asp-Ala-Ala-Phe-Leu-PyrS2-3Thi-BztA-Gln-[lithocholate]- | 1127 |
| | Lys-NH2 | |
| I-1478 | Ac-PL3-Asp-Npg-B5-Asp-Asp-Ala-Ala-Phe-Leu-PyrS2-3Thi-BztA-Gln-[lithocholate- | 1128 |
| | PEG2]-Lys-NH2 | |
| I-1479 | Ac-PL3-Asp-Npg-B5-Asp-Asp-Ala-Ala-Phe-Leu-PyrS2-3Thi-BztA-Gln- | 1129 |
| | [Me3AdamantC]-Lys-NH2 | |
| I-1480 | Ac-PL3-Asp-Npg-B5-Asp-Asp-Ala-Ala-Phe-Leu-PyrS2-3Thi-BztA-Gln- | 1130 |
| | Me3AdamantC-PEG2]-Lys-NH2 | |
| I-1481 | Ac-PL3-Asp-Npg-B5-Asp-Asp-MorphNva-Ala-Phe-Leu-PyrS2-3Thi-BztA-Gln-NH2 | 1131 |
| I-1482 | Ac-PL3-Asp-Npg-B5-Asp-Asp-F2PipNva-Ala-Phe-Leu-PyrS2-3Thi-BztA-Gln-NH2 | 1132 |
| I-1483 | Ac-PL3-Asp-Npg-B5-Asp-Asp-MorphAsn-Ala-Phe-Leu-PyrS2-3Thi-BztA-Gln-NH2 | 1133 |
| I-1484 | Ac-PL3-Asp-Npg-B5-Asp-Asp-MePpzAsn-Ala-Phe-Leu-PyrS2-3Thi-BztA-Gln-NH2 | 1134 |
| I-1485 | Ac-PL3-Asp-Npg-B5-Asp-Asp-Ala-Ala-Phe-MorphNva-PyrS2-3Thi-BztA-Gln-NH2 | 1135 |
| I-1486 | Ac-PL3-Asp-Npg-B5-Asp-Asp-Ala-Ala-Phe-F2PipNva-PyrS2-3Thi-BztA-Gln-NH2 | 1136 |
| I-1487 | Ac-PL3-Asp-Npg-B5-Asp-Asp-Ala-Ala-Phe-MorphAsn-PyrS2-3Thi-BztA-Gln-NH2 | 1137 |
| I-1488 | Ac-PL3-Asp-Npg-B5-Asp-Asp-Ala-Ala-Phe-MePpzAsn-PyrS2-3Thi-BztA-Gln-NH2 | 1138 |
| I-1489 | Ac-PL3-Asp-Npg-B5-Asp-Asp-[3Py]4SF-Ala-Phe-Leu-PyrS2-Phe-BztA-Gln-NH2 | 1139 |
| I-1490 | Ac-PL3-Asp-Npg-B5-Asp-Asp-Ala-Ala-[3Py]4SF-Leu-PyrS2-Phe-BztA-Gln-NH2 | 1140 |
| I-1491 | Ac-PL3-Asp-Npg-B5-Asp-Asp-Ala-Ala-Phe-Hse-S8-2C1F-BztA-Thro1 | 1141 |
| I-1492 | Ac-PL3-Asp-Npg-B5-Asp-Asp-Ala-Ala-Phe-Leu-PyrS2-3Thi-BztA-Asn-NH2 | 1142 |
| I-1493 | Ac-PL3-Asp-Npg-B5-Asp-Asp-Ala-Ala-Phe-Leu-PyrS2-3Thi-BztA-Ser-NH2 | 1143 |
| I-1494 | Ac-PL3-Asp-Npg-B5-Asp-Asp-Ala-Ala-Phe-Leu-PyrS2-3Thi-BztA-Thr-NH2 | 1144 |
| I-1495 | Ac-PL3-Asp-Npg-B5-Asp-Asp-Ala-Ala-Phe-Leu-PyrS2-3Thi-BztA-Val-NH2 | 1145 |
| I-1496 | Ac-PL3-Asp-Npg-B5-Asp-Asp-Ala-Ala-Phe-Leu-PyrS2-3Thi-BztA-Phe-NH2 | 1146 |
| I-1497 | Ac-PL3-Asp-Npg-B5-Asp-Asp-Ala-Ala-Phe-Leu-PyrS2-3Thi-BztA-Trp-NH2 | 1147 |
| I-1498 | Ac-PL3-Asp-Npg-B5-Asp-Asp-Ala-Ala-Phe-Leu-PyrS2-3Thi-BztA-4TriA-NH2 | 1148 |
| I-1499 | Ac-PL3-Asp-Npg-B5-Asp-Asp-Ala-Ala-Phe-Leu-PyrS2-3Thi-BztA-Hse-NH2 | 1149 |
| I-1500 | Ac-PL3-Asp-Npg-B5-Asp-Asp-Ala-Ala-Phe-Leu-PyrS2-3Thi-BztA-dGln-NH2 | 1150 |
| I-1501 | Ac-PL3-Asp-Npg-B5-Asp-Asp-Ala-MorphNva-Phe-Leu-PyrS2-3Thi-BztA-Gln-NH2 | 1151 |
| I-1502 | Ac-PL3-Asp-Npg-B5-Asp-Asp-Ala-F2PipNva-Phe-Leu-PyrS2-3Thi-BztA-Gln-NH2 | 1152 |
| I-1503 | Ac-PL3-Asp-Npg-B5-Asp-Asp-Ala-MePpzNva-Phe-Leu-PyrS2-3Thi-BztA-Gln-NH2 | 1153 |
| I-1504 | Ac-PL3-Asp-Npg-B5-Asp-Asp-Ala-MorphAbu-Phe-Leu-PyrS2-3Thi-BztA-Gln-NH2 | 1154 |
| I-1505 | Ac-PL3-Asp-Npg-B5-Asp-Asp-Ala-F2PipAbu-Phe-Leu-PyrS2-3Thi-BztA-Gln-NH2 | 1155 |
| I-1506 | Ac-PL3-Asp-Npg-B5-Asp-Asp-Ala-MePpzAbu-Phe-Leu-PyrS2-3Thi-BztA-Gln-NH2 | 1156 |
| I-1507 | Ac-PL3-Asp-Npg-B5-Asp-Asp-Ala-MorphAsn-Phe-Leu-PyrS2-3Thi-BztA-Gln-NH2 | 1157 |
| I-1508 | Ac-PL3-Asp-Npg-B5-Asp-Asp-Ala-MePpzAsn-Phe-Leu-PyrS2-3Thi-BztA-Gln-NH2 | 1158 |
| I-1509 | Ac-PL3-Asp-Phe-B5-Asp-Asp-Ala-Ala-Phe-Leu-PyrS2-3Thi-BztA-Gln-NH2 | 1159 |
| I-1510 | Ac-PL3-Asp-Phe-B5-Asp-Asp-Ala-Ala-Phe-Leu-PyrS2-3Thi-BztA-Hse-NH2 | 1160 |
| I-1511 | Ac-PL3-Asp-Tyr-B5-Asp-Asp-Ala-Ala-Phe-Leu-PyrS2-3Thi-BztA-Gln-NH2 | 1161 |
| I-1512 | Ac-PL3-Asp-Tyr-B5-Asp-Asp-Ala-Ala-Phe-Leu-PyrS2-3Thi-BztA-Hse-NH2 | 1162 |
| I-1513 | Ac-PL3-Asp-Ser-B5-Asp-Asp-Ala-Ala-Phe-Leu-PyrS2-3Thi-BztA-Gln-NH2 | 1163 |
| I-1514 | Ac-PL3-Asp-Ser-B5-Asp-Asp-Ala-Ala-Phe-Leu-PyrS2-3Thi-BztA-Hse-NH2 | 1164 |
| I-1515 | Ac-PL3-Asp-Thr-B5-Asp-Asp-Ala-Ala-Phe-Leu-PyrS2-3Thi-BztA-Gln-NH2 | 1165 |
| I-1516 | Ac-PL3-Asp-Thr-B5-Asp-Asp-Ala-Ala-Phe-Leu-PyrS2-3Thi-BztA-Hse-NH2 | 1166 |
| I-1517 | Ac-PL3-Asp-Asn-B5-Asp-Asp-Ala-Ala-Phe-Leu-PyrS2-3Thi-BztA-Gln-NH2 | 1167 |
| I-1518 | Ac-PL3-Asp-Asn-B5-Asp-Asp-Ala-Ala-Phe-Leu-PyrS2-3Thi-BztA-Hse-NH2 | 1168 |
| I-1519 | Ac-PL3-Asp-Cha-B5-Asp-Asp-Ala-Ala-Phe-Leu-PyrS2-3Thi-BztA-Gln-NH2 | 1169 |
| I-1520 | Ac-PL3-Asp-Cha-B5-Asp-Asp-Ala-Ala-Phe-Leu-PyrS2-3Thi-BztA-Hse-NH2 | 1170 |
| I-1521 | Ac-PL3-Asp-nLeu-B5-Asp-Glu-Ala-Ala-Phe-Gln-S8-Phe-BztA-Gln-NH2 | 1171 |
| I-1522 | Ac-PL3-Asp-nLeu-B5-Asp-Glu-Ala-Ala-Phe-Gln-S8-Phe-BztA-Gln-NH2 | 1171 |
| I-1523 | Ac-PL3-Asp-nLeu-B5-Asp-Glu-Ala-Ala-Phe-Leu-S8-Phe-BztA-Gln-NH2 | 1172 |
| I-1524 | Ac-PL3-Asp-nLeu-B5-Asp-Glu-Ala-Ala-Phe-Hse-S8-Phe-BztA-Gln-NH2 | 1173 |
| I-1525 | Ac-PL3-Asp-nLeu-B5-Asp-Glu-Ala-Ala-Phe-Hse-S8-Phe-BztA-Gln-NH2 | 1173 |
| I-1526 | Ac-PL3-Asp-Ser-B5-Asp-Glu-Ala-Ala-Phe-Gln-S8-Phe-BztA-Gln-NH2 | 1174 |
| I-1527 | Ac-PL3-Asp-Ser-B5-Asp-Glu-Ala-Ala-Phe-Gln-S8-Phe-BztA-Gln-NH2 | 1174 |
| I-1528 | Ac-PL3-Asp-Ser-B5-Asp-Glu-Ala-Ala-Phe-Leu-S8-Phe-BztA-Gln-NH2 | 1175 |
| I-1529 | Ac-PL3-Asp-Ser-B5-Asp-Glu-Ala-Ala-Phe-Hse-S8-Phe-BztA-Gln-NH2 | 1176 |
| I-1530 | Ac-PL3-Asp-Ser-B5-Asp-Glu-Ala-Ala-Phe-Hse-S8-Phe-BztA-Gln-NH2 | 1176 |
| I-1531 | Ac-PL3-Asp-Asn-B5-Asp-Glu-Ala-Ala-Phe-Gln-S8-Phe-BztA-Gln-NH2 | 1177 |
| I-1532 | Ac-PL3-Asp-Asn-B5-Asp-Glu-Ala-Ala-Phe-Gln-S8-Phe-BztA-Gln-NH2 | 1177 |
| I-1533 | Ac-PL3-Asp-Asn-B5-Asp-Glu-Ala-Ala-Phe-Leu-S8-Phe-BztA-Gln-NH2 | 1178 |
| I-1534 | Ac-PL3-Asp-Asn-B5-Asp-Glu-Ala-Ala-Phe-Hse-S8-Phe-BztA-Gln-NH2 | 1179 |
| I-1535 | Ac-PL3-Asp-Asn-B5-Asp-Glu-Ala-Ala-Phe-Hse-S8-Phe-BztA-Gln-NH2 | 1179 |
| I-1536 | Ac-PL3-Asp-Hleu-B5-Asp-Glu-Ala-Ala-Phe-Leu-S8-Phe-BztA-Gln-NH2 | 1180 |
| I-1537 | Ac-PL3-Asp-Hleu-B5-Asp-Glu-Ala-Ala-Phe-Hse-S8-Phe-BztA-Gln-NH2 | 1181 |
| I-1538 | Ac-PL3-Asp-Hleu-B5-Asp-Glu-Ala-Ala-Phe-Hse-S8-Phe-BztA-Gln-NH2 | 1181 |
| I-1539 | Ac-PL3-Asp-Gln-B5-Asp-Glu-Ala-Ala-Phe-Gln-S8-Phe-BztA-Gln-NH2 | 1182 |
| I-1540 | Ac-PL3-Asp-Gln-B5-Asp-Glu-Ala-Ala-Phe-Gln-S8-Phe-BztA-Gln-NH2 | 1182 |
| I-1541 | Ac-PL3-Asp-Gln-B5-Asp-Glu-Ala-Ala-Phe-Leu-S8-Phe-BztA-Gln-NH2 | 1183 |
| I-1542 | Ac-PL3-Asp-Gln-B5-Asp-Glu-Ala-Ala-Phe-Hse-S8-Phe-BztA-Gln-NH2 | 1184 |
| I-1543 | Ac-PL3-Asp-Gln-B5-Asp-Glu-Ala-Ala-Phe-Hse-S8-Phe-BztA-Gln-NH2 | 1184 |
| I-1544 | Ac-PL3-Asp-Hse-B5-Asp-Glu-Ala-Ala-Phe-Gln-S8-Phe-BztA-Gln-NH2 | 1185 |
| I-1545 | Ac-PL3-Asp-Hse-B5-Asp-Glu-Ala-Ala-Phe-Gln-S8-Phe-BztA-Gln-NH2 | 1185 |
| I-1546 | Ac-PL3-Asp-Hse-B5-Asp-Glu-Ala-Ala-Phe-Leu-S8-Phe-BztA-Gln-NH2 | 1186 |
| I-1547 | Ac-PL3-Asp-Hse-B5-Asp-Glu-Ala-Ala-Phe-Hse-S8-Phe-BztA-Gln-NH2 | 1187 |
| I-1548 | Ac-PL3-Asp-Hse-B5-Asp-Glu-Ala-Ala-Phe-Hse-S8-Phe-BztA-Gln-NH2 | 1187 |
| I-1549 | Ac-PL3-Asp-Phe-B5-Asp-Glu-Ala-Ala-Phe-Gln-S8-Phe-BztA-Gln-NH2 | 1188 |
| I-1550 | Ac-PL3-Asp-Phe-B5-Asp-Glu-Ala-Ala-Phe-Leu-S8-Phe-BztA-Gln-NH2 | 1189 |
| I-1551 | Ac-PL3-Asp-Phe-B5-Asp-Glu-Ala-Ala-Phe-Hse-S8-Phe-BztA-Gln-NH2 | 1190 |
| I-1552 | Ac-PL3-Asp-Lys-B5-Asp-Glu-Ala-Ala-Phe-Gln-S8-Phe-BztA-Gln-NH2 | 1191 |
| I-1553 | Ac-PL3-Asp-Lys-B5-Asp-Glu-Ala-Ala-Phe-Leu-S8-Phe-BztA-Gln-NH2 | 1192 |
| I-1554 | Ac-PL3-Asp-Lys-B5-Asp-Glu-Ala-Ala-Phe-Hse-S8-Phe-BztA-Gln-NH2 | 1193 |
| I-1555 | Ac-PL3-Asp-Npg-B5-Asn-Asn-Ala-Ala-Phe-Asn-PyrS2-3Thi-BztA-Gln-NH2 | 1194 |
| I-1556 | Ac-PL3-Asp-Ala-B5-Asn-Asn-Ala-Ala-Phe-Asn-PyrS2-3Thi-BztA-Gln-NH2 | 1195 |
| I-1557 | Ac-PL3-Asp-Npg-B5-Asn-Asn-Ala-Ala-Phe-Leu-PyrS2-3Thi-BztA-Gln-NH2 | 1196 |
| I-1558 | Ac-PL3-Asp-Npg-B5-Gln-Gln-Ala-Ala-Phe-Asn-PyrS2-3Thi-BztA-Gln-NH2 | 1197 |
| I-1559 | Ac-PL3-Asp-Npg-B5-Thr-Asn-Ala-Ala-Phe-Asn-PyrS2-3Thi-BztA-Gln-NH2 | 1198 |
| I-1560 | Ac-PL3-Asp-Npg-B5-Gln-Asn-Ala-Ala-Phe-Asn-PyrS2-3Thi-BztA-Gln-NH2 | 1199 |
| I-1561 | Ac-PL3-Asp-Npg-B5-Ser-Asn-Ala-Ala-Phe-Asn-PyrS2-3Thi-BztA-Gln-NH2 | 1200 |
| I-1562 | Ac-PL3-Asp-Npg-B5-Leu-Asn-Ala-Ala-Phe-Asn-PyrS2-3Thi-BztA-Gln-NH2 | 1201 |
| I-1563 | Ac-PL3-Asp-Npg-B5-Leu-Asn-Ala-Ala-Phe-Asn-PyrS2-3Thi-BztA-Gln-NH2 | 1201 |
| I-1564 | Ac-PL3-Asp-Npg-B5-Asn-Thr-Ala-Ala-Phe-Asn-PyrS2-3Thi-BztA-Gln-NH2 | 1202 |
| I-1565 | Ac-PL3-Asp-Npg-B5-Asn-Thr-Ala-Ala-Phe-Asn-PyrS2-3Thi-BztA-Gln-NH2 | 1202 |
| I-1566 | Ac-PL3-Asp-Npg-B5-Asn-Gln-Ala-Ala-Phe-Asn-PyrS2-3Thi-BztA-Gln-NH2 | 1203 |
| I-1567 | Ac-PL3-Asp-Npg-B5-Asn-Gln-Ala-Ala-Phe-Asn-PyrS2-3Thi-BztA-Gln-NH2 | 1203 |
| I-1568 | Ac-PL3-Asp-Npg-B5-Asn-Tyr-Ala-Ala-Phe-Asn-PyrS2-3Thi-BztA-Gln-NH2 | 1204 |
| I-1569 | Ac-PL3-Asp-Npg-B5-Asn-Tyr-Ala-Ala-Phe-Asn-PyrS2-3Thi-BztA-Gln-NH2 | 1204 |
| I-1570 | Ac-PL3-Asp-Npg-B5-Asn-Leu-Ala-Ala-Phe-Asn-PyrS2-3Thi-BztA-Gln-NH2 | 1205 |
| I-1571 | Ac-PL3-Asp-Npg-B5-Asp-[Pfb]GA-Ala-Ala-Phe-Asn-PyrS2-2C1F-BztA-Gln-NH2 | 1206 |
| I-1572 | Ac-PL3-Asp-Npg-B5-Asp-GA-Ala-Ala-Phe-Asn-PyrS2-2C1F-BztA-Gln-NH2 | 1207 |
| I-1573 | Ac-HypEs5-Asp-Npg-B5-Asp-Asp-Ala-Ala-Phe-Asn-PyrS2-3Thi-BztA-Gln-NH2 | 1208 |
| I-1574 | MeSO2-HypEs5-Asp-Npg-B5-Asp-Asp-Ala-Ala-Phe-Asn-PyrS2-3Thi-BztA-Gln-NH2 | 1209 |
| I-1575 | Ac-HypEs4-Asp-Npg-B5-Asp-Asp-Ala-Ala-Phe-Asn-PyrS2-3Thi-BztA-Gln-NH2 | 1210 |
| I-1576 | ProSAm3-Asp-Npg-B5-Asp-Asp-Ala-Ala-Phe-Asn-PyrS2-3Thi-BztA-Gln-NH2 | 1211 |
| I-1577 | ProSAm3-Asp-Npg-B5-Asp-Asp-Ala-Ala-Phe-Asn-PyrS2-3Thi-BztA-Gln-NH2 | 1211 |
| I-1578 | Ac-PL3-Asp-Npg-B5-Asp-3TzF-Ala-Ala-Phe-Asn-PyrS2-3Thi-BztA-Gln-NH2 | 1212 |
| I-1579 | Ac-PL3-Asp-Npg-B5-Asp-4TzF-Ala-Ala-Phe-Asn-PyrS2-3Thi-BztA-Gln-NH2 | 1213 |
| I-1580 | Ac-PL3-Asn-Phe-B5-Asp-Thr-iPrLys-Ala-Phe-Leu-PyrS2-Phe-BztA-Gln-NH2 | 1214 |
| I-1581 | Ac-PL3-Asn-Trp-B5-Asp-Thr-iPrLys-Ala-Phe-Leu-PyrS2-Phe-BztA-Gln-NH2 | 1215 |
| I-1582 | Ac-PL3-Asn-Leu-B5-Asp-Thr-iPrLys-Ala-Phe-Leu-PyrS2-Phe-BztA-Gln-NH2 | 1216 |
| I-1583 | Ac-PL3-Asn-Ser-B5-Asp-Thr-iPrLys-Ala-Phe-Leu-PyrS2-Phe-BztA-Gln-NH2 | 1217 |
| I-1584 | Ac-PL3-Asn-Gln-B5-Asp-Thr-iPrLys-Ala-Phe-Leu-PyrS2-Phe-BztA-Gln-NH2 | 1218 |
| I-1585 | Ac-PL3-Asn-Npg-B5-Asp-Thr-iPrLys-Ala-Phe-Leu-PyrS2-Phe-Tyr-Gln-NH2 | 1219 |
| I-1586 | Ac-PL3-Asn-Npg-B5-Asp-Thr-iPrLys-Ala-Phe-Leu-PyrS2-Phe-5C1W-Gln-NH2 | 1220 |
| I-1587 | Ac-PL3-Asn-Npg-B5-Asp-Thr-iPrLys-Ala-Phe-Leu-PyrS2-Phe-6C1W-Gln-NH2 | 1221 |
| I-1588 | Ac-PL3-Asn-Npg-B5-Asp-Thr-iPrLys-Ala-Phe-Leu-PyrS2-Phe-7FW-Gln-NH2 | 1222 |
| I-1589 | Ac-PL3-Asn-Npg-B5-Asp-Thr-iPrLys-Ala-Phe-Leu-PyrS2-Phe-1MeW-Gln-NH2 | 1223 |
| I-1590 | Ac-PL3-Asn-Npg-B5-Asp-Thr-iPrLys-Ala-Phe-Leu-PyrS2-Tyr-Trp-Gln-NH2 | 1224 |
| I-1591 | Ac-PL3-Asn-iPrLys-B5-Asp-Thr-iPrLys-Ala-Phe-Leu-PyrS2-Phe-BztA-Gln-NH2 | 1225 |
| I-1592 | Ac-PL3-Asn-Npg-B5-Asp-3cbmf-iPrLys-Ala-Phe-Leu-PyrS2-Phe-BztA-Gln-NH2 | 1226 |
| I-1593 | Ac-PL3-Asn-Npg-B5-Asp-Phe-iPrLys-Ala-Phe-Leu-PyrS2-Phe-BztA-Gln-NH2 | 1227 |
| I-1594 | Ac-PL3-Asn-Npg-B5-Asp-Npg-iPrLys-Ala-Phe-Leu-PyrS2-Phe-BztA-Gln-NH2 | 1228 |
| I-1595 | Ac-PL3-Asn-Npg-B5-Asp-3F3MeF-iPrLys-Ala-Phe-Leu-PyrS2-Phe-BztA-Gln-NH2 | 1229 |
| I-1596 | Ac-PL3-Asn-Npg-B5-Asp-Ala-iPrLys-Ala-Phe-Leu-PyrS2-Phe-BztA-Gln-NH2 | 1230 |
| I-1597 | Ac-PL3-Asn-Npg-B5-Asp-Thr-iPrLys-Ala-Ser-Leu-PyrS2-Phe-BztA-Gln-NH2 | 1231 |
| I-1598 | Ac-PL3-Asn-Npg-B5-Asp-Thr-iPrLys-Ala-Npg-Leu-PyrS2-Phe-BztA-Gln-NH2 | 1232 |
| I-1599 | Ac-PL3-Asn-Npg-B5-Asp-Thr-iPrLys-Ala-Phe-Phe-PyrS2-Phe-BztA-Gln-NH2 | 1233 |
| I-1600 | Ac-PL3-Asn-Npg-B5-Asp-Thr-iPrLys-Ala-Phe-Trp-PyrS2-Phe-BztA-Gln-NH2 | 1234 |
| I-1601 | Ac-PL3-Asn-Npg-B5-Asp-Thr-iPrLys-Ala-Phe-Ser-PyrS2-Phe-BztA-Gln-NH2 | 1235 |
| I-1602 | Ac-PL3-Asn-Npg-B5-Asp-Thr-iPrLys-Ala-Phe-Asn-PyrS2-Phe-BztA-Gln-NH2 | 1236 |
| I-1603 | Ac-PL3-Asn-Npg-B5-Asp-Thr-iPrLys-Ala-Phe-Leu-PyrS2-Npg-BztA-Gln-NH2 | 1237 |
| I-1604 | Ac-PL3-Asp-Npg-B5-Asp-3COOHF-Ala-Ala-Phe-Leu-PyrS2-2F3MeF-BztA-Gln-NH2 | 1116 |
| I-1605 | Ac-PL3-Asp-Npg-B5-Asp-TfeGA-Ala-Ala-Phe-Leu-PyrS2-3Thi-BztA-Gln-NH2 | 571 |
| I-1606 | Ac-PL3-Asp-Npg-B5-Asp-TfeGA-Ala-Ala-Phe-Thr-PyrS2-2C1F-BztA-Gln-NH2 | 639 |
| I-1607 | Ac-PL3-Asp-Npg-B5-Asp-TfeGA-Ala-Ala-Phe-Thr-PyrS2-2C1F-BztA-F2PipNva-NH2 | 1238 |
| I-1608 | Ac-PL3-Asp-Npg-B5-Asp-3COOHF-Ala-Ala-Phe-Leu-PyrS2-2F3MeF-BztA- | 1239 |
| | F2PipNva-NH2 | |
| I-1609 | Ac-PL3-Asp-Npg-B5-Asp-TfeGA-Ala-Ala-Phe-Thr-PyrS2-2C1F-BztA-MorphNva-NH2 | 1240 |
| I-1610 | Ac-PL3-Asp-Npg-B5-Asp-3COOHF-Ala-Ala-Phe-Leu-PyrS2-2F3MeF-BztA- | 1241 |
| | MorphNva-NH2 | |
| I-1611 | Ac-PL3-Asp-Npg-B5-Asp-TfeGA-Ala-Ala-Phe-Thr-PyrS2-2C1F-BztA-MePpzAsn-NH2 | 1242 |
| I-1612 | Ac-PL3-Asp-Npg-B5-Asp-3COOHF-Ala-Ala-Phe-Leu-PyrS2-2F3MeF-BztA- | 1243 |
| | MePpzAsn-NH2 | |
| I-1613 | Ac-PL3-Asp-Npg-B5-Asp-TfeGA-Ala-Ala-Phe-Thr-PyrS2-2C1F-BztA-MorphAsn-NH2 | 1244 |
| I-1614 | Ac-PL3-Asp-Npg-B5-Asp-3COOHF-Ala-Ala-Phe-Leu-PyrS2-2F3MeF-BztA- | 1245 |
| | MorphAsn-NH2 | |
| I-1615 | Ac-PL3-Asp-Npg-B5-Asp-TfeGA-Ala-Ala-Phe-Thr-PyrS2-2C1F-BztA-iPrLys-NH2 | 1246 |
| I-1616 | Ac-PL3-Asp-Npg-B5-Asp-3COOHF-Ala-Ala-Phe-Leu-PyrS2-2F3MeF-BztA-iPrLys- | 1247 |
| | NH2 | |
| I-1617 | Ac-PL3-Asp-Npg-B5-Asn-Thr-Ala-Ala-Phe-Asn-S8-3Thi-BztA-Gln-NH2 | 1248 |
| I-1618 | Ac-PL3-Asp-Npg-B5-Asn-Thr-Ala-Ala-Phe-Leu-PyrS2-3Thi-BztA-Gln-NH2 | 1249 |
| I-1619 | Ac-PL3-Asp-Npg-B5-Asn-Thr-Ala-Ala-Phe-nLeu-PyrS2-3Thi-BztA-Gln-NH2 | 1250 |
| I-1620 | Ac-PL3-Asp-Npg-B5-Asn-Thr-Ala-Ala-Phe-hLeu-PyrS2-3Thi-BztA-Gln-NH2 | 1251 |
| I-1621 | Ac-PL3-Asp-Npg-B5-Asn-Thr-Ala-Ala-Phe-Thr-PyrS2-3Thi-BztA-Gln-NH2 | 1252 |
| I-1622 | Ac-PL3-Asp-Npg-B5-Asp-[Et]GA-Ala-Ala-Phe-Asn-PyrS2-2C1F-BztA-Gln-NH2 | 1253 |
| I-1623 | Ac-PL3-Asp-Npg-B5-Asp-[sBu]GA-Ala-Ala-Phe-Asn-PyrS2-2C1F-BztA-Gln-NH2 | 1254 |
| I-1624 | Ac-PL3-Asp-Npg-B5-Asp-[Pfbn]GA-Ala-Ala-Phe-Asn-S8-3Thi-BztA-Gln-NH2 | 1255 |
| I-1625 | Ac-PL3-Asp-Npg-B5-Asp-[Tfp]GA-Ala-Ala-Phe-Asn-S8-3Thi-BztA-Gln-NH2 | 1256 |
| I-1626 | Ac-PL3-Asp-Npg-B5-Asp-[sBu]GA-Ala-Ala-Phe-Asn-S8-3Thi-BztA-Gln-NH2 | 1257 |
| I-1627 | Ac-PL3-Asp-Npg-B5-Asp-[Et]GA-Ala-Ala-Phe-Asn-S8-3Thi-BztA-Gln-NH2 | 1258 |
| I-1628 | Ac-PL3-Asp-Npg-B5-Asp-[Et]GA-Ala-Ala-Phe-Asn-S8-3Thi-BztA-Gln-NH2 | 1258 |
| I-1629 | Ac-PL3-Asp-Npg-B5-Asp-[Tfb]GA-Ala-Ala-Phe-Leu-PyrS2-3Thi-BztA-Gln-NH2 | 1259 |
| I-1630 | Ac-PL3-Asp-Npg-B5-Asp-[Bn]GA-Ala-Ala-Phe-Leu-PyrS2-3Thi-BztA-Gln-NH2 | 1260 |
| I-1631 | Ac-PL3-Asp-Npg-B5-Asp-[Me]GA-Ala-Ala-Phe-Leu-PyrS2-3Thi-BztA-Gln-NH2 | 1261 |
| I-1632 | Ac-PL3-Asp-Npg-B5-Asp-[Pfbn]GA-Ala-Ala-Phe-Leu-PyrS2-3Thi-BztA-Gln-NH2 | 1262 |
| I-1633 | Ac-PL3-Asp-Npg-B5-Asp-[Tfp]GA-Ala-Ala-Phe-Leu-PyrS2-3Thi-BztA-Gln-NH2 | 1263 |
| I-1634 | Ac-PL3-Asp-Npg-B5-Asp-[Tfb]GA-Ala-Ala-Phe-Asn-PyrS2-3Thi-BztA-Gln-NH2 | 1264 |
| I-1635 | Ac-PL3-Asp-Npg-B5-Asp-[Bn]GA-Ala-Ala-Phe-Asn-PyrS2-3Thi-BztA-Gln-NH2 | 1265 |
| I-1636 | Ac-PL3-Asp-Npg-B5-Asp-[Me]GA-Ala-Ala-Phe-Asn-PyrS2-3Thi-BztA-Gln-NH2 | 1266 |
| I-1637 | Ac-PL3-Asp-Npg-B5-Asp-[Me]GA-Ala-Ala-Phe-Asn-PyrS2-3Thi-BztA-Gln-NH2 | 1266 |
| I-1638 | Ac-PL3-Asp-Npg-B5-Asp-[Pfbn]GA-Ala-Ala-Phe-Asn-PyrS2-3Thi-BztA-Gln-NH2 | 1267 |
| I-1639 | Ac-PL3-Asp-Npg-B5-Asp-[Pfbn]GA-Ala-Ala-Phe-Asn-PyrS2-3Thi-BztA-Gln-NH2 | 1267 |
| I-1640 | Ac-PL3-Asp-Npg-B5-Asp-[Tfp]GA-Ala-Ala-Phe-Asn-PyrS2-3Thi-BztA-Gln-NH2 | 1268 |
| I-1641 | Ac-PL3-Asp-Npg-B5-Asp-TfeGA-Ala-Ala-Phe-Asn-PyrS2-3Thi-BztA-Gln-NEt2 | 1269 |
| I-1642 | Ac-PL3-Asp-Npg-B5-Asp-TfeGA-Ala-Ala-Phe-Asn-PyrS2-3Thi-BztA-Gln-NHCyHe | 1270 |
| I-1643 | Ac-PL3-Asn-Npg-B5-Asp-Gln-iPrLys-Ala-Phe-Leu-PyrS2-Phe-BztA-Lys-NH2 | 1271 |
| I-1644 | Ac-PL3-Asn-Npg-B5-Asp-Gln-iPrLys-Ala-Phe-Leu-PyrS2-Phe-BztA-Npg-NH2 | 1272 |
| I-1645 | Ac-PL3-Asn-Npg-B5-Asp-Gln-iPrLys-Ala-Phe-Leu-PyrS2-Phe-BztA-iPrLys-NH2 | 1273 |
| I-1646 | Ac-PL3-Asn-Npg-B5-Asp-Gln-iPrLys-Ala-Phe-Leu-PyrS2-Phe-BztA-Hse-NH2 | 1274 |
| I-1647 | Ac-PL3-Asn-Tyr-B5-Asp-Gln-iPrLys-Ala-Phe-Leu-PyrS2-Phe-BztA-Gln-NH2 | 1275 |
| I-1648 | Ac-PL3-Asn-Cha-B5-Asp-Gln-iPrLys-Ala-Phe-Leu-PyrS2-Phe-BztA-Gln-NH2 | 1276 |
| I-1649 | Ac-PL3-Asn-Npg-B5-Asp-Gln-iPrLys-Ala-Cha-Leu-PyrS2-Phe-BztA-Gln-NH2 | 1277 |
| I-1650 | Ac-PL3-Asn-Npg-B5-Asp-Gln-iPrLys-Ala-Phe-Cha-PyrS2-Phe-BztA-Gln-NH2 | 1278 |
| I-1651 | Ac-PL3-Asn-Npg-B5-Asp-Gln-iPrLys-Ala-Phe-Leu-PyrS2-Cha-BztA-Gln-NH2 | 1279 |
| I-1652 | Ac-PL3-Asn-Npg-B5-Asp-Gln-iPrLys-Ala-Phe-Leu-PyrS2-Phe-BztA-Cha-NH2 | 1280 |
| I-1653 | Ac-PL3-Asn-Npg-B5-Asp-Gln-iPrLys-Ala-Phe-iPrLys-PyrS2-Phe-BztA-Gln-NH2 | 1281 |
| I-1654 | Ac-PL3-Asn-Npg-B5-Asp-Gln-iPrLys-Ala-Phe-iPrLys-PyrS2-Phe-BztA-iPrLys-NH2 | 1282 |
| I-1655 | Ac-PL3-Asp-Npg-B5-Asp-2COOHF-Ala-Ala-Phe-Phe-PyrS2-2F3MeF-BztA-Gln-NH2 | 1283 |
| I-1656 | Ac-PL3-Asp-Npg-B5-Asp-2COOHF-Ala-Ala-Phe-Leu-PyrS2-2F3MeF-BztA-Gln-NH2 | 1284 |
| I-1657 | Ac-PL3-Asp-Npg-B5-Asp-2COOHF-Ala-Ala-Phe-Phe-PyrS2-2C1F-BztA-Gln-NH2 | 1285 |
| I-1658 | Ac-PL3-Asp-Npg-B5-Asp-2COOHF-Ala-Ala-Phe-Leu-PyrS2-2C1F-BztA-Gln-NH2 | 1286 |
| I-1659 | Ac-PL3-Asp-Npg-B5-Asp-2COOHF-Ala-Ala-Phe-Phe-PyrS2-2F3MeF-BztA-Ser-NH2 | 1287 |
| I-1660 | Ac-PL3-Asp-Npg-B5-Asp-2COOHF-Ala-Ala-Phe-Leu-PyrS2-2F3MeF-BztA-Ser-NH2 | 1288 |
| I-1661 | Ac-PL3-Asp-Npg-B5-Asp-2COOHF-Ala-Ala-Phe-Leu-PyrS2-2F3MeF-BztA-Ser-NH2 | 1288 |
| I-1662 | Ac-PL3-Asp-Npg-B5-Asp-2COOHF-Ala-Ala-Phe-Phe-PyrS2-2C1F-BztA-Ser-NH2 | 1289 |
| I-1663 | Ac-PL3-Asp-Npg-B5-Asp-2COOHF-Ala-Ala-Phe-Leu-PyrS2-2C1F-BztA-Ser-NH2 | 1290 |
| I-1664 | Ac-PL3-Asp-Npg-B5-Asp-2COOHF-Ala-Ala-Phe-Phe-PyrS2-3Thi-BztA-Ser-NH2 | 1291 |
| I-1665 | Ac-PL3-Asp-Npg-B5-Asp-2COOHF-Ala-Ala-Phe-Phe-PyrS2-3Thi-BztA-Ser-NH2 | 1291 |
| I-1666 | Ac-PL3-Asp-Npg-B5-Asp-2COOHF-Ala-Ala-Phe-Leu-PyrS2-3Thi-BztA-Ser-NH2 | 1292 |
| I-1667 | Ac-PL3-Asp-Npg-B5-Asp-2COOHF-Ala-Ala-Phe-Leu-PyrS2-3Thi-BztA-Ser-NH2 | 1292 |
| I-1668 | Ac-PL3-Asp-Npg-B5-Asp-2COOHF-Ala-Ala-Phe-Phe-PyrS2-3Thi-BztA-Thro1 | 1293 |
| I-1669 | Ac-PL3-Asp-Npg-B5-Asp-2COOHF-Ala-Ala-Phe-Phe-PyrS2-3Thi-BztA-Thro1 | 1293 |
| I-1670 | Ac-PL3-Asp-Npg-B5-Asp-2COOHF-Ala-Ala-Phe-Leu-PyrS2-3Thi-BztA-Thro1 | 1294 |
| I-1671 | Ac-PL3-Asp-Npg-B5-Asp-2COOHF-Ala-Ala-Phe-Leu-PyrS2-3Thi-BztA-Thro1 | 1294 |
| I-1672 | Ac-PL3-Asp-Npg-B5-Asp-3COOHF-Ala-Ala-Phe-Leu-PyrS2-2C1F-BztA-Gln-NHEt | 1295 |
| I-1673 | Ac-PL3-Asp-Npg-B5-Asp-3COOHF-Ala-Ala-Phe-Leu-PyrS2-2C1F-BztA-Gln-Alao1 | 1296 |
| I-1674 | Ac-PL3-Asp-Npg-B5-Asp-3COOHF-Ala-Ala-Phe-Leu-PyrS2-2C1F-BztA-Gln- | 1297 |
| I-1675 | Ac-PL3-Asp-Npg-B5-Asp-3COOHF-Ala-Ala-Phe-Leu-PyrS2-2C1F-BztA-Gln-Proo1 | 1298 |
| I-1676 | Ac-PL3-Asp-Npg-B5-Asp-3COOHF-Ala-Ala-Phe-Leu-PyrS2-2C1F-BztA-Gln-Leuo1 | 1299 |
| I-1677 | Ac-PL3-Asp-Npg-B5-Asp-3COOHF-Ala-Ala-Phe-Leu-PyrS2-2C1F-BztA-Gln-Thro1 | 1300 |
| I-1678 | Ac-PL3-Asp-Npg-B5-Asp-TfeGA-Ala-Ala-Phe-Leu-PyrS2-3Thi-BztA-Gln-NHEt | 1301 |
| I-1679 | Ac-PL3-Asp-Npg-B5-Asp-TfeGA-Ala-Ala-Phe-Leu-PyrS2-3Thi-BztA-Gln-Alao1 | 1302 |
| I-1680 | Ac-PL3-Asp-Npg-B5-Asp-TfeGA-Ala-Ala-Phe-Leu-PyrS2-3Thi-BztA-Gln-Pheo1 | 1303 |
| I-1681 | Ac-PL3-Asp-Npg-B5-Asp-TfeGA-Ala-Ala-Phe-Leu-PyrS2-3Thi-BztA-Gln-Proo1 | 1304 |
| I-1682 | Ac-PL3-Asp-Npg-B5-Asp-TfeGA-Ala-Ala-Phe-Leu-PyrS2-3Thi-BztA-Gln-Leuo1 | 1305 |
| I-1683 | Ac-PL3-Asp-Npg-B5-Asp-TfeGA-Ala-Ala-Phe-Leu-PyrS2-3Thi-BztA-Gln-Thro1 | 1306 |
| I-1684 | Ac-PL3-Asp-Npg-B5-Asp-3COOHF-Gly-Ala-Phe-Leu-PyrS2-2C1F-BztA-Gln-NH2 | 1307 |
| I-1685 | Ac-PL3-Asp-Npg-B5-Asp-3COOHF-nLeu-Ala-Phe-Leu-PyrS2-2C1F-BztA-Gln-NH2 | 1308 |
| I-1686 | Ac-PL3-Asp-Npg-B5-Asp-3COOHF-Aib-Ala-Phe-Leu-PyrS2-2C1F-BztA-Gln-NH2 | 1309 |
| I-1687 | Ac-PL3-Asp-Npg-B5-Asp-3COOHF-Ala-Gly-Phe-Leu-PyrS2-2C1F-BztA-Gln-NH2 | 1310 |
| I-1688 | Ac-PL3-Asp-Npg-B5-Asp-3COOHF-nLeu-Gly-Phe-Leu-PyrS2-2C1F-BztA-Gln-NH2 | 1311 |
| I-1689 | Ac-PL3-Asp-Npg-B5-Asp-3COOHF-Aib-Gly-Phe-Leu-PyrS2-2C1F-BztA-Gln-NH2 | 1312 |
| I-1690 | Ac-PL3-Asp-Npg-B5-Asp-TfeGA-Gly-Ala-Phe-Thr-PyrS2-2C1F-BztA-Gln-NH2 | 1313 |
| I-1691 | Ac-PL3-Asp-Npg-B5-Asp-TfeGA-Gly-Ala-Phe-Thr-PyrS2-2C1F-BztA-Gln-NH2 | 1313 |
| I-1692 | Ac-PL3-Asp-Npg-B5-Asp-TfeGA-nLeu-Ala-Phe-Thr-PyrS2-2C1F-BztA-Gln-NH2 | 1314 |
| I-1693 | Ac-PL3-Asp-Npg-B5-Asp-TfeGA-Aib-Ala-Phe-Thr-PyrS2-2C1F-BztA-Gln-NH2 | 1315 |
| I-1694 | Ac-PL3-Asp-Npg-B5-Asp-TfeGA-Ala-Gly-Phe-Thr-PyrS2-2C1F-BztA-Gln-NH2 | 1316 |
| I-1695 | Ac-PL3-Asp-Npg-B5-Asp-TfeGA-nLeu-Gly-Phe-Thr-PyrS2-2C1F-BztA-Gln-NH2 | 1317 |
| I-1696 | Ac-PL3-Asp-Npg-B5-Asp-TfeGA-Aib-Gly-Phe-Thr-PyrS2-2C1F-BztA-Gln-NH2 | 1318 |
| I-1697 | Ac-PL3-Asp-Npg-B5-Asp-TfeGA-Ala-Ala-Phe-Leu-PyrS3-3Thi-BztA-Gln-NH2 | 1319 |
| I-1698 | Ac-PL3-Asp-Npg-B5-Asp-TfeGA-Ala-Ala-Phe-Leu-S8-3Thi-BztA-Gln-NH2 | 1320 |
| I-1699 | Ac-PL3-Asp-Npg-B5-Asp-TfeGA-Ala-Ala-Phe-Hse-PyrS2-2C1F-BztA-Hse-NH2 | 684 |
| I-1700 | Ac-PL3-Asp-Npg-B5-Asp-TfeGA-Ala-Ala-Phe-Leu-PyrS2-Phe-BztA-Gln-NH2 | 1321 |
| I-1701 | Ac-PL3-Asp-Npg-B5-Asp-TfeGA-Ala-Ala-Phe-Leu-PyrS2-3PyrA-BztA-Gln-NH2 | 1322 |
| I-1702 | Ac-PL3-Asp-Npg-B5-Asp-TfeGA-Ala-Ala-Phe-Leu-PyrS2-2CNF-BztA-Gln-NH2 | 1323 |
| I-1703 | Ac-PL3-Asp-Npg-B5-Asp-TfeGA-Ala-Ala-Phe-Leu-PyrS2-CypA-BztA-Gln-NH2 | 1324 |
| I-1704 | Ac-PL3-Asp-Npg-B5-Asp-TfeGA-Ala-Ala-Phe-Leu-PyrS2-2F3MeF-BztA-Gln-NH2 | 1325 |
| I-1705 | Ac-PL3-Asp-Npg-B5-Asp-TfeGA-Ala-Ala-Phe-Leu-PyrS2-3Thi-BztA-Asn-NH2 | 1326 |
| I-1706 | Ac-PL3-Asp-Npg-B5-Asp-TfeGA-Ala-Ala-Phe-Leu-PyrS2-3Thi-BztA-Thr-NH2 | 1327 |
| I-1707 | Ac-PL3-Asp-Npg-B5-Asp-TfeGA-Ala-Ala-Phe-Leu-PyrS2-3Thi-BztA-2cbmf-NH2 | 1328 |
| I-1708 | Ac-PL3-Asp-Npg-B5-Asp-TfeGA-Ala-Ala-Phe-Leu-PyrS2-3Thi-BztA-3cbmf-NH2 | 1329 |
| I-1709 | Ac-PL3-Asp-Npg-B5-Asp-TfeGA-Ala-Ala-Phe-Leu-PyrS2-3Thi-BztA-AcLys-NH2 | 1330 |
| I-1710 | Ac-PL3-Asp-Npg-B5-Asp-TfeGA-Ala-Ala-Phe-Leu-PyrS2-3Thi-BztA-Ala-NH2 | 1331 |
| I-1711 | Ac-PL3-Asp-Npg-B5-Asp-TfeGA-Ala-Ala-Phe-Leu-PyrS2-Phe-BztA-Gln-NH2 | 1321 |
| I-1712 | Ac-PL3-Asp-Npg-B5-Asp-TfeGA-Ala-Ala-Phe-Leu-PyrS2-2CNF-BztA-Gln-NH2 | 1323 |
| I-1713 | Ac-PL3-Asp-Npg-B5-Asp-TfeGA-Ala-Ala-Phe-Leu-PyrS2-CypA-BztA-Gln-NH2 | 1324 |
| I-1714 | Ac-PL3-Asp-Npg-B5-Asp-TfeGA-Ala-Ala-Phe-Leu-PyrS2-2F3MeF-BztA-Gln-NH2 | 1325 |
| I-1715 | Ac-PL3-Asp-Npg-B5-Asp-TfeGA-Ala-Ala-Phe-Leu-PyrS2-3Thi-BztA-Asn-NH2 | 1326 |
| I-1716 | Ac-PL3-Asp-Npg-B5-Asp-TfeGA-Ala-Ala-Phe-Leu-PyrS2-3Thi-BztA-Thr-NH2 | 1327 |
| I-1717 | Ac-PL3-Asp-Npg-B5-Asp-TfeGA-Ala-Ala-Phe-Leu-PyrS2-3Thi-BztA-2cbmf-NH2 | 1328 |
| I-1718 | Ac-PL3-Asp-Npg-B5-Asp-TfeGA-Ala-Ala-Phe-Leu-PyrS2-3Thi-BztA-3cbmf-NH2 | 1329 |
| I-1719 | Ac-PL3-Asp-Npg-B5-Asp-TfeGA-Ala-Ala-Phe-Leu-PyrS2-3Thi-BztA-AcLys-NH2 | 1330 |
| I-1720 | Ac-PL3-Asp-Npg-B5-Asp-TfeGA-Ala-Ala-Phe-Leu-PyrS2-3Thi-BztA-Ala-NH2 | 1331 |
| I-1721 | Ac-PL3-AspSH-Npg-B5-Asp-Asp-Ala-Ala-Phe-Asn-PyrS2-2C1F-BztA-Gln-NH2 | 1332 |
| I-1722 | Ac-PL3-AspSH-Npg-B5-Asp-Asp-Ala-Ala-Phe-Asn-PyrS2-2C1F-BztA-Gln-NH2 | 1332 |
| I-1723 | Ac-PL3-[EtSSpy]AspE-Npg-B5-Asp-Asp-Ala-Ala-Phe-Asn-PyrS2-2C1F-BztA-Gln- | 1333 |
| | NH2 | |
| I-1724 | Ac-PL3-[EtSSpy]AspE-Npg-B5-Asp-Asp-Ala-Ala-Phe-Asn-PyrS2-2C1F-BztA-Gln- | 1333 |
| | NH2 | |
| I-1725 | Ac-PL3-Asp-Npg-B5-Asp-TfeGA-Ala-Ala-Phe-Leu-PyrS2-2MeF-BztA-Gln-NH2 | 1334 |
| I-1726 | Ac-PL3-Asp-Npg-B5-Asp-TfeGA-Ala-Ala-Phe-Leu-PyrS2-2MeF-BztA-Gln-NH2 | 1334 |
| I-1727 | Ac-PL3-Asp-Npg-B5-Asp-Asp-Ala-Ala-2NH2F-Asn-PyrS2-2C1F-BztA-Gln-NH2 | 1335 |
| I-1728 | Ac-PL3-Asp-Npg-B5-Asp-Asp-Ala-Ala-2NH2F-Asn-PyrS2-3Thi-BztA-Gln-NH2 | 1336 |
| I-1729 | Ac-PL3-Asp-Npg-B5-Asp-[Ac]GA-Ala-Ala-Phe-Leu-PyrS2-3Thi-BztA-Gln-NH2 | 1337 |
| I-1730 | Ac-PL3-Asp-Npg-B5-Asp-[CF3CO]GA-Ala-Ala-Phe-Leu-PyrS2-3Thi-BztA-Gln-NH2 | 1338 |
| I-1731 | Ac-PL3-Asp-Npg-B5-Asp-GA-Ala-Ala-Phe-Leu-PyrS2-3Thi-BztA-Gln-NH2 | 1339 |
| I-1732 | Ac-PL3-Asp-Npg-B5-Asp-GA-Ala-Ala-Phe-Asn-PyrS2-3Thi-BztA-Gln-NH2 | 1340 |
| I-1733 | Ac-PL3-Asp-Npg-B5-Asp-GA-Ala-Ala-Phe-Asn-PyrS2-3Thi-BztA-Gln-NH2 | 1340 |
| I-1734 | Ac-PL3-Asp-Npg-B5-Asp-[Pfb]GA-Ala-Ala-Phe-Asn-PyrS2-3Thi-BztA-Gln-NH2 | 1341 |
| I-1735 | Ac-PL3-Asp-Npg-B5-Asn-Thr-Ala-Ala-Phe-Asn-PyrS2-Phe-BztA-Gln-NH2 | 1342 |
| I-1736 | Ac-PL3-Asp-Npg-B5-Asn-Thr-Ala-Ala-Phe-Asn-PyrS2-2Thi-BztA-Gln-NH2 | 1343 |
| I-1737 | Ac-PL3-Asp-Npg-B5-Asn-Thr-Ala-Ala-Phe-Asn-PyrS2-2MeF-BztA-Gln-NH2 | 1344 |
| I-1738 | Ac-PL3-Asp-Npg-B5-Asn-Thr-Ala-Ala-Phe-Asn-PyrS2-2F3MeF-BztA-Gln-NH2 | 1345 |
| I-1739 | Ac-PL3-Asp-Npg-B5-Asn-Thr-Ala-Ala-Phe-Asn-PyrS2-3MeF-BztA-Gln-NH2 | 1346 |
| I-1740 | Ac-PL3-Asp-Npg-B5-Asn-Thr-Ala-Ala-Phe-Phe-PyrS2-3Thi-BztA-Gln-NH2 | 1347 |
| I-1741 | Ac-PL3-Asp-Npg-B5-Asn-Thr-Ala-Ala-Phe-Trp-PyrS2-3Thi-BztA-Gln-NH2 | 1348 |
| I-1742 | Ac-PL3-Asp-Npg-B5-Asn-Thr-Ala-Ala-Phe-Asn-PyrS2-3Thi-BztA-NH2 | 1349 |
| I-1743 | Ac-PL3-Asp-Npg-B5-Asn-Thr-Ala-Ala-Phe-Asn-PyrS2-3Thi-BztA-Arg-NH2 | 1350 |
| I-1744 | Ac-PL3-Asp-Npg-B5-Asn-Thr-Ala-Ala-Phe-Asn-PyrS2-3Thi-BztA-Phe-NH2 | 1351 |
| I-1745 | Ac-PL3-Asp-Npg-B5-Asn-Thr-Ala-Ala-Phe-Asn-PyrS2-3Thi-BztA-Thr-NH2 | 1352 |
| I-1746 | Ac-PL3-Asp-Npg-B5-Asn-Thr-Ala-Ala-Phe-Asn-PyrS2-3Thi-BztA-Asn-NH2 | 1353 |
| I-1747 | Ac-PL3-Asp-Npg-B5-Asp-TfeGA-Ala-Ala-Phe-Leu-PyrS2-3Thi-BztA-Leu-NH2 | 1354 |
| I-1748 | Ac-PL3-Asp-Npg-B5-Asp-TfeGA-Ala-Ala-Phe-Leu-PyrS2-3Thi-BztA-Leu-NH2 | 1354 |
| I-1749 | Ac-PL3-Asp-Npg-B5-Asp-TfeGA-Ala-Ala-Phe-Leu-PyrS2-3Thi-BztA-Phe-NH2 | 1355 |
| I-1750 | Ac-PL3-Asp-Npg-B5-Asp-TfeGA-Ala-Ala-Phe-Leu-PyrS2-3Thi-BztA-Phe-NH2 | 1355 |
| I-1751 | Ac-PL3-Asp-Npg-B5-Asp-TfeGA-Ala-Ala-Phe-Leu-PyrS2-3Thi-BztA-Val-NH2 | 1356 |
| I-1752 | Ac-PL3-Asp-Npg-B5-Asp-TfeGA-Ala-Ala-Phe-Leu-PyrS2-3Thi-BztA-Val-NH2 | 1356 |
| I-1753 | Ac-PL3-Asp-Npg-B5-Asp-TfeGA-Ala-Ala-Phe-Leu-PyrS2-3Thi-BztA-Leu-NH2 | 1354 |
| I-1754 | Ac-PL3-Asp-Npg-B5-Asp-TfeGA-Ala-Ala-Phe-Thr-PyrS2-3Thi-BztA-Leu-NH2 | 1357 |
| I-1755 | Ac-PL3-Asp-Npg-B5-Asp-TfeGA-Ala-Ala-Phe-Leu-PyrS2-3Thi-BztA-Phe-NH2 | 1355 |
| I-1756 | Ac-PL3-Asp-Npg-B5-Asp-TfeGA-Ala-Ala-Phe-Thr-PyrS2-3Thi-BztA-Phe-NH2 | 1358 |
| I-1757 | Ac-PL3-Asp-Npg-B5-Asp-TfeGA-Ala-Ala-Phe-Leu-PyrS2-3Thi-BztA-Val-NH2 | 1356 |
| I-1758 | Ac-PL3-Asp-Npg-B5-Asp-TfeGA-Ala-Ala-Phe-Thr-PyrS2-3Thi-BztA-Val-NH2 | 1359 |
| I-1759 | Ac-PL3-Asp-Npg-B5-Asp-TfeGA-iPrLys-Ala-Phe-Leu-PyrS2-3Thi-BztA-Leu-NH2 | 1360 |
| I-1760 | Ac-PL3-Asp-Npg-B5-Asp-TfeGA-iPrLys-Ala-Phe-Thr-PyrS2-3Thi-BztA-Leu-NH2 | 1361 |
| I-1761 | Ac-PL3-Asp-Npg-B5-Asp-TfeGA-iPrLys-Ala-Phe-Leu-PyrS2-3Thi-BztA-Phe-NH2 | 1362 |
| I-1762 | Ac-PL3-Asp-Npg-B5-Asp-TfeGA-iPrLys-Ala-Phe-Thr-PyrS2-3Thi-BztA-Phe-NH2 | 1363 |
| I-1763 | Ac-PL3-Asp-Npg-B5-Asp-TfeGA-iPrLys-Ala-Phe-Leu-PyrS2-3Thi-BztA-Val-NH2 | 1364 |
| I-1764 | Ac-PL3-Asp-Npg-B5-Asp-TfeGA-iPrLys-Ala-Phe-Thr-PyrS2-3Thi-BztA-Val-NH2 | 1365 |
| I-1765 | Ac-PL3-Asp-Npg-B5-Asp-TfeGA-iPrLys-Ala-Phe-Leu-PyrS2-3Thi-BztA-Leu-NH2 | 1360 |
| I-1766 | Ac-PL3-Asp-Npg-B5-Asp-TfeGA-iPrLys-Ala-Phe-Thr-PyrS2-3Thi-BztA-Leu-NH2 | 1361 |
| I-1767 | Ac-PL3-Asp-Npg-B5-Asp-TfeGA-iPrLys-Ala-Phe-Leu-PyrS2-3Thi-BztA-Phe-NH2 | 1362 |
| I-1768 | Ac-PL3-Asp-Npg-B5-Asp-TfeGA-iPrLys-Ala-Phe-Thr-PyrS2-3Thi-BztA-Phe-NH2 | 1363 |
| I-1769 | Ac-PL3-Asp-Npg-B5-Asp-TfeGA-iPrLys-Ala-Phe-Leu-PyrS2-3Thi-BztA-Val-NH2 | 1364 |
| I-1770 | Ac-PL3-Asp-Npg-B5-Asp-TfeGA-iPrLys-Ala-Phe-Thr-PyrS2-3Thi-BztA-Val-NH2 | 1365 |
| I-1771 | Ac-PL3-Asp-Npg-B5-bMe2Asp-TfeGA-Ala-Ala-Phe-Leu-PyrS2-3Thi-BztA-Gln-NH2 | 1366 |
| I-1772 | Ac-PL3-Asp-Npa-B5-Asp-TfeGA-Ala-Ala-Phe-Leu-PyrS2-3Thi-BztA-Gln-NH2 | 1367 |
| I-1773 | Ac-PL3-Asp-Npg-B5-Asp-TfeGA-Ala-Ala-Phe-Npg-PyrS2-3Thi-BztA-Gln-NH2 | 1368 |
| I-1774 | Ac-PL3-Asp-Npg-B5-Asp-TfeGA-Ala-Ala-Phe-Cha-PyrS2-3Thi-BztA-Gln-NH2 | 1369 |
| I-1775 | Ac-PL3-Asp-Cha-B5-Asp-TfeGA-Ala-Ala-Phe-Leu-PyrS2-3Thi-BztA-Gln-NH2 | 1370 |
| I-1776 | Ac-PL3-Asp-Npg-B5-Asp-TfeGA-Ala-Ala-Phe-nLeu-PyrS2-3Thi-BztA-Gln-NH2 | 1371 |
| I-1777 | Ac-PL3-Asp-nLeu-B5-Asp-TfeGA-Ala-Ala-Phe-Leu-PyrS2-3Thi-BztA-Gln-NH2 | 1372 |
| I-1778 | Ac-PL3-Asp-Npg-S5-Asp-Asp-Ala-Ala-Phe-R5-Ala-3Thi-BztA-S5-Ala-NH2 | 1373 |
| I-1779 | Ac-PL3-Asp-Npg-S5-Asp-Asp-Ala-Ala-Phe-R5-Ala-3Thi-BztA-S5-Ala-NH2 | 1373 |
| I-1780 | Ac-PL3-Asp-Npg-S5-Asp-Asp-Aib-Ala-Phe-R5-Ala-3Thi-BztA-S5-Ala-NH2 | 1374 |
| I-1781 | Ac-PL3-Asp-Npg-S5-Asp-Asp-Aib-Ala-Phe-R5-Ala-3Thi-BztA-S5-Ala-NH2 | 1374 |
| I-1782 | Ac-PL3-Asp-Npg-S5-Asp-Asp-R5-Ala-Phe-Leu-Ala-3Thi-BztA-PyrS2-Ala-NH2 | 1375 |
| I-1783 | Ac-PL3-Asp-Npg-B5-Asp-Tyr-Ala-Ala-Phe-Hse-PyrS2-3Thi-BztA-Gln-NH2 | 1376 |
| I-1784 | Ac-PL3-Asp-Npg-B5-Asp-Tyr-Ala-Ala-Phe-Leu-PyrS2-3Thi-BztA-Gln-NH2 | 1377 |
| I-1785 | Ac-PL3-Asp-Npg-B5-Asp-hTyr-Ala-Ala-Phe-Asn-PyrS2-3Thi-BztA-Gln-NH2 | 1378 |
| I-1786 | Ac-PL3-Asp-Npg-B5-Asp-hTyr-Ala-Ala-Phe-Hse-PyrS2-3Thi-BztA-Gln-NH2 | 1379 |
| I-1787 | Ac-PL3-Asp-Npg-B5-Asp-hTyr-Ala-Ala-Phe-Leu-PyrS2-3Thi-BztA-Gln-NH2 | 1380 |
| I-1788 | Ac-PL3-Asp-Npg-B5-Asp-Trp-Ala-Ala-Phe-Asn-PyrS2-3Thi-BztA-Gln-NH2 | 1381 |
| I-1789 | Ac-PL3-Asp-Npg-B5-Asp-Trp-Ala-Ala-Phe-Hse-PyrS2-3Thi-BztA-Gln-NH2 | 1382 |
| I-1790 | Ac-PL3-Asp-Npg-B5-Asp-Pff-Ala-Ala-Phe-Asn-PyrS2-3Thi-BztA-Gln-NH2 | 1383 |
| I-1791 | Ac-PL3-Asp-Npg-B5-Asp-Pff-Ala-Ala-Phe-Hse-PyrS2-3Thi-BztA-Gln-NH2 | 1384 |
| I-1792 | Ac-PL3-Asp-Npg-B5-Asp-Pff-Ala-Ala-Phe-Leu-PyrS2-3Thi-BztA-Gln-NH2 | 1385 |
| I-1793 | Ac-PL3-Asp-Npg-B5-Asp-His-Ala-Ala-Phe-Hse-PyrS2-3Thi-BztA-Gln-NH2 | 1386 |
| I-1794 | Ac-PL3-Asp-Npg-B5-Asp-His-Ala-Ala-Phe-Hse-PyrS2-3Thi-BztA-Gln-NH2 | 1386 |
| I-1795 | Ac-PL3-Asp-Npg-B5-Asp-His-Ala-Ala-Phe-Leu-PyrS2-3Thi-BztA-Gln-NH2 | 1387 |
| I-1796 | Ac-PL3-Asp-Npg-B5-Asp-His-Ala-Ala-Phe-Leu-PyrS2-3Thi-BztA-Gln-NH2 | 1387 |
| I-1797 | Ac-PL3-Asp-Npg-B5-Asp-TfeGA-Ala-Ala-Phe-Leu-PyrS2-3Thi-BztA-[4Pippip]GlnR- | 1388 |
| | NH2 | |
| I-1798 | Ac-PL3-Asp-Npg-B5-Asp-TfeGA-Ala-Ala-Phe-Leu-PyrS2-3Thi-BztA-[4Pippip]GlnR- | 1388 |
| | NH2 | |
| I-1799 | Ac-PL3-Asp-Npg-B5-Asp-TfeGA-Ala-Ala-Phe-Leu-PyrS2-3Thi-BztA- | 1389 |
| | [Me2NPrPip]GlnR-NH2 | |
| I-1800 | Ac-PL3-Asp-Npg-B5-Asp-TfeGA-Ala-Ala-Phe-Leu-PyrS2-3Thi-BztA- | 1389 |
| | [Me2NPrPip]GlnR-NH2 | |
| I-1801 | Ac-PL3-Asp-Npg-B5-Asp-TfeGA-Ala-Ala-Phe-Leu-PyrS2-3Thi-BztA- | 1390 |
| | [4MePpzPip]GlnR-NH2 | |
| I-1802 | Ac-PL3-Asp-Npg-B5-Asp-TfeGA-Ala-Ala-Phe-Leu-PyrS2-3Thi-BztA- | 1390 |
| | [4MePpzPip]GlnR-NH2 | |
| I-1803 | Ac-PL3-Asp-Npg-B5-Asp-TfeGA-Ala-Ala-Phe-Leu-PyrS2-3Thi-BztA-[TfePpz]GlnR- | 1391 |
| | NH2 | |
| I-1804 | Ac-PL3-Asp-Npg-B5-Asp-TfeGA-Ala-Ala-Phe-Leu-PyrS2-3Thi-BztA- | 1392 |
| | [RDMAPyr]GlnR-NH2 | |
| I-1805 | Ac-PL3-Asp-Npg-B5-Asp-TfeGA-Ala-Ala-Phe-Leu-PyrS2-3Thi-BztA- | 1392 |
| | [RDMAPyr]GlnR-NH2 | |
| I-1806 | Ac-PL3-Asp-Npg-S5-Asp-Asp-Ala-Ala-Phe-Leu-Aib-3Thi-BztA-Gln-NH2 | 1393 |
| I-1807 | Ac-PL3-Asp-Npg-S5-Asp-Asp-Ala-Ala-Phe-Leu-Aib-3Thi-BztA-Gln-NH2 | 1393 |
| I-1808 | Ac-PL3-Asp-Npg-B5-Asp-Asp-Ala-Ala-Phe-Leu-PyrS2-3Thi-BztA-Gln-NH2 | 528 |
| I-1809 | Ac-PL3-Asp-Npg-S5-Asp-Asp-Ala-Ala-Phe-Leu-Aib-3Thi-BztA-Gln-NH2 | 1393 |
| I-1810 | Ac-Pro-Asp-Npg-R5-Asp-Asp-Ala-Ala-Phe-Leu-PyrS2-3Thi-BztA-Gln-NH2 | 856 |
| I-1811 | Ac-PL3-Asp-Leu-B5-Asp-Asp-Ala-Ala-Phe-Leu-PyrS2-Phe-Trp-Gln-NH2 | 1394 |
| I-1812 | Ac-PL3-Asp-Npg-B5-Asp-Asp-Ala-Ala-Phe-Asn-PyrS1-3Thi-BztA-Gln-NH2 | 1395 |
| I-1813 | Ac-PL3-Asp-Npg-B5-Asp-Asp-Ala-Ala-Phe-Asn-PyrS1-3Thi-BztA-Gln-NH2 | 1395 |
| I-1814 | Ac-PL3-Asp-Npg-B5-Asp-Asp-Ala-Ala-Phe-Leu-PyrS1-3Thi-BztA-Gln-NH2 | 1396 |
| I-1815 | Ac-PL3-Asp-Npg-B5-Asp-Asp-Ala-Ala-Phe-Leu-PyrS1-3Thi-BztA-Gln-NH2 | 1396 |
| I-1816 | Ac-PL3-Asp-Npg-B5-Asp-Asp-Ala-Ala-Phe-Asn-PyrS-3Thi-BztA-Gln-NH2 | 1397 |
| I-1817 | Ac-PL3-Asp-Npg-B5-Asp-Asp-Ala-Ala-Phe-Asn-PyrS-3Thi-BztA-Gln-NH2 | 1397 |
| I-1818 | Ac-PL3-Asp-Npg-B5-Asp-Asp-Ala-Ala-Phe-Leu-PyrS-3Thi-BztA-Gln-NH2 | 1398 |
| I-1819 | Ac-PL3-Asp-Npg-B5-Asp-Asp-Ala-Ala-Phe-Asn-S7-3Thi-BztA-Gln-NH2 | 1399 |
| I-1820 | Ac-PL3-Asp-Npg-B5-Asp-Asp-Ala-Ala-Phe-Leu-S7-3Thi-BztA-Gln-NH2 | 1400 |
| I-1821 | Ac-PL3-Asp-Npg-B5-Asp-Asp-Ala-Ala-Phe-Asn-PyrS1-3Thi-BztA-Gln-NH2 | 1395 |
| I-1822 | Ac-PL3-Asp-Npg-B5-Asp-Asp-Ala-Ala-Phe-Leu-PyrS1-3Thi-BztA-Gln-NH2 | 1396 |
| I-1823 | Ac-PL3-Asp-Npg-B5-Asp-Asp-Ala-Ala-Phe-Asn-PyrS-3Thi-BztA-Gln-NH2 | 1397 |
| I-1824 | Ac-PL3-Asp-Npg-B5-Asp-Asp-Ala-Ala-Phe-Leu-PyrS-3Thi-BztA-Gln-NH2 | 1398 |
| I-1825 | Ac-PL3-Asp-Npg-B5-Asp-Asp-Ala-Ala-Phe-Asn-S7-3Thi-BztA-Gln-NH2 | 1399 |
| I-1826 | Ac-PL3-Asp-Npg-B5-Asp-Asp-Ala-Ala-Phe-Asn-Az-3Thi-BztA-Gln-NH2 | 1401 |
| I-1827 | Ac-PL3-Asp-Npg-B5-Asp-Asp-Ala-Ala-Phe-Asn-Az-3Thi-BztA-Gln-NH2 | 1401 |
| I-1828 | Ac-PL3-Asp-Npg-B5-Asp-Asp-Ala-Ala-Phe-Leu-Az-3Thi-BztA-Gln-NH2 | 1402 |
| I-1829 | Ac-PL3-Asp-Npg-B5-Asp-Asp-Ala-Ala-Phe-Asn-SdN-3Thi-BztA-Gln-NH2 | 1403 |
| I-1830 | Ac-PL3-Asp-Npg-B5-Asp-Asp-Ala-Ala-Phe-Leu-SdN-3Thi-BztA-Gln-NH2 | 1404 |
| I-1831 | Ac-PL3-Asp-Npg-B5-Asp-Asp-Ala-Ala-Phe-Asn-Az-3Thi-BztA-Gln-NH2 | 1401 |
| I-1832 | Ac-PL3-Asp-Npg-B5-Asp-Asp-Ala-Ala-Phe-Leu-Az-3Thi-BztA-Gln-NH2 | 1402 |
| I-1833 | Ac-PL3-Asp-Npg-B5-Asp-TfeGA-Ala-Ala-Phe-Leu-PyrS2-2C1F-BztA-Gln-NH2 | 1405 |
| I-1834 | Ac-PL3-Asp-Npg-B5-Asp-[Bn]GAbu-Ala-Ala-Phe-Leu-PyrS2-3Thi-BztA-Gln-NH2 | 1406 |
| I-1835 | Ac-PL3-Asp-Npg-B5-Asp-[Et]GAbu-Ala-Ala-Phe-Leu-PyrS2-3Thi-BztA-Gln-NH2 | 1407 |
| I-1836 | Ac-PL3-Asp-Npg-B5-Asp-[CH2CO2H]GAbu-Ala-Ala-Phe-Leu-PyrS2-3Thi-BztA-Gln- | 1408 |
| | NH2 | |
| I-1837 | Ac-PL3-Asp-Npg-B5-Asp-[Tfb]GAbu-Ala-Ala-Phe-Leu-PyrS2-3Thi-BztA-Gln-NH2 | 1409 |
| I-1838 | Ac-PL3-Asp-Npg-B5-Asp-[Pfbn]GAbu-Ala-Ala-Phe-Leu-PyrS2-3Thi-BztA-Gln-NH2 | 1410 |
| I-1839 | Ac-PL3-Asp-Npg-B5-Asp-[Tfp]GAbu-Ala-Ala-Phe-Leu-PyrS2-3Thi-BztA-Gln-NH2 | 1411 |
| I-1840 | Ac-PL3-Asp-Npg-B5-Asp-[Ac]GAbu-Ala-Ala-Phe-Leu-PyrS2-3Thi-BztA-Gln-NH2 | 1412 |
| I-1841 | Ac-PL3-Asp-Npg-B5-Asp-GAbu-Ala-Ala-Phe-Leu-PyrS2-3Thi-BztA-Gln-NH2 | 1413 |
| I-1842 | Ac-PL3-Asp-Npg-B5-Asp-[MorphEt]GAbu-Ala-Ala-Phe-Leu-PyrS2-3Thi-BztA-Gln- | 1414 |
| | NH2 | |
| I-1843 | Ac-PL3-Asp-Npg-B5-Asp-[2COOH4NO2Ph]Dap-Ala-Ala-Phe-Leu-PyrS2-3Thi-BztA- | 1415 |
| | Gln-NH2 | |
| I-1844 | Ac-PL3-Asp-Npg-B5-Asp-[3COOH4NO2Ph]Dap-Ala-Ala-Phe-Leu-PyrS2-3Thi-BztA- | 1416 |
| | Gln-NH2 | |
| I-1845 | Ac-PL3-Asp-Npg-B5-Asp-[2Nic]Dap-Ala-Ala-Phe-Leu-PyrS2-3Thi-BztA-Gln-NH2 | 1417 |
| I-1846 | Ac-HyPEs5-Asp-Npg-B5-Asp-TfeGA-Ala-Ala-Phe-Thr-PyrS2-2C1F-BztA-Gln-NH2 | 1418 |
| I-1847 | Ac-HypEs5-Asp-Npg-B5-Asp-3COOHF-Ala-Ala-Phe-Leu-PyrS2-2C1F-BztA-Gln-NH2 | 1419 |
| I-1848 | Ac-PL3-Asp-Npg-B5-Asp-[2COOH4NO2Ph]Cys-Ala-Ala-Phe-Leu-PyrS2-3Thi-BztA- | 1420 |
| | Gln-NH2 | |
| I-1849 | Ac-PL3-Asp-Npg-B5-Asp-3COOHF-Ala-Ala-Phe-Ala-PyrS2-2C1F-BztA-Ser-NH2 | 1421 |
| I-1850 | Ac-PL3-Asp-Npg-B5-Asp-3COOHF-Ala-Ala-Phe-Val-PyrS2-2C1F-BztA-Ser-NH2 | 1422 |
| I-1851 | Ac-PL3-Asp-Npg-B5-Asp-3COOHF-Ala-Ala-Phe-Leu-PyrS2-2C1F-BztA-Ala-NH2 | 1423 |
| I-1852 | Ac-PL3-Asp-Npg-B5-Asp-3COOHF-Ala-Ala-Phe-Leu-PyrS2-2C1F-BztA-NH2 | 1424 |
| I-1853 | Ac-PL3-Asn-Npg-B5-Asp-3COOHF-Ala-Ala-Phe-Leu-PyrS2-2C1F-BztA-Ser-NH2 | 1425 |
| I-1854 | Ac-PL3-Asp-Npg-B5-Asp-TfeGA-Ala-Ala-[CH2NMe2]TriAzDap-Leu-PyrS2-3Thi- | 1426 |
| | BztA-Gln-NH2 | |
| I-1855 | Ac-PL3-Asp-Npg-B5-Asp-TfeGA-Ala-Ala-[CH2NMe2]TriAzDap-Leu-PyrS2-3Thi- | 1426 |
| | BztA-Gln-NH2 | |
| I-1856 | Ac-PL3-Asp-Npg-B5-Asp-TfeGA-Ala-Ala-[CH2Ppz]TriAzDap-Leu-PyrS2-3Thi-BztA- | 1427 |
| | Gln-NH2 | |
| I-1857 | Ac-PL3-Asp-Npg-B5-Asp-TfeGA-Ala-Ala-[CH2Ppz]TriAzDap-Leu-PyrS2-3Thi-BztA- | 1427 |
| | Gln-NH2 | |
| I-1858 | Ac-PL3-Asp-Npg-B5-Asp-TfeGA-Ala-Ala-[MorphCH2]TriAzDap-Leu-PyrS2-3Thi- | 1428 |
| | BztA-Gln-NH2 | |
| I-1859 | Ac-PL3-Asp-Npg-B5-Asp-TfeGA-Ala-Ala-[MorphCH2]TriAzDap-Leu-PyrS2-3Thi- | 1428 |
| | BztA-Gln-NH2 | |
| I-1860 | Ac-PL3-Asp-Npg-B5-Asp-TfeGA-Ala-Ala-[SO2MorphCH2]TriAzDap-Leu-PyrS2- | 1429 |
| | 3Thi-BztA-Gln-NH2 | |
| I-1861 | Ac-PL3-Asp-Npg-B5-Asp-TfeGA-Ala-Ala-Phe-[CH2NMe2]TriAzDap-PyrS2-3Thi- | 1430 |
| | BztA-Gln-NH2 | |
| I-1862 | Ac-PL3-Asp-Npg-B5-Asp-TfeGA-Ala-Ala-Phe-[CH2NMe2]TriAzDap-PyrS2-3Thi- | 1430 |
| | BztA-Gln-NH2 | |
| I-1863 | Ac-PL3-Asp-Npg-B5-Asp-TfeGA-Ala-Ala-Phe-[CH2Ppz]TriAzDap-PyrS2-3Thi-BztA- | 1431 |
| | Gln-NH2 | |
| I-1864 | Ac-PL3-Asp-Npg-B5-Asp-TfeGA-Ala-Ala-Phe-[CH2Ppz]TriAzDap-PyrS2-3Thi-BztA- | 1431 |
| | Gln-NH2 | |
| I-1865 | Ac-PL3-Asp-Npg-B5-Asp-TfeGA-Ala-Ala-Phe-[MorphCH2]TriAzDap-PyrS2-3Thi- | 1432 |
| | BztA-Gln-NH2 | |
| I-1866 | Ac-PL3-Asp-Npg-B5-Asp-TfeGA-Ala-Ala-Phe-[MorphCH2]TriAzDap-PyrS2-3Thi- | 1432 |
| | BztA-Gln-NH2 | |
| I-1867 | Ac-PL3-Asp-Npg-B5-Asp-TfeGA-Ala-Ala-Phe-[MorphCH2]TriAzDap-PyrS2-3Thi- | 1432 |
| | BztA-Gln-NH2 | |
| I-1868 | Ac-PL3-Asp-Npg-B5-Asp-TfeGA-Ala-Ala-Phe-[SO2MorphCH2]TriAzDap-PyrS2- | 1433 |
| | 3Thi-BztA-Gln-NH2 | |
| I-1869 | Ac-PL3-Asp-Npg-B5-Asp-TfeGA-Ala-Ala-Phe-[SO2MorphCH2]TriAzDap-PyrS2- | 1433 |
| | 3Thi-BztA-Gln-NH2 | |
| I-1870 | Ac-PL3-Asp-Npg-B5-Asn-Thr-Ala-Ala-Phe-Asn-PyrS2-3Thi-1NapA-Gln-NH2 | 1434 |
| I-1871 | Ac-PL3-Asp-Npg-B5-Asn-Thr-Ala-Ala-Phe-Asn-PyrS2-3Thi-1NapA-Gln-NH2 | 1434 |
| I-1872 | Ac-PL3-Asp-Npg-B5-Asn-Thr-Ala-Ala-Phe-Asn-PyrS2-3Thi-2NapA-Gln-NH2 | 1435 |
| I-1873 | Ac-PL3-Asp-Npg-B5-Asn-Thr-Ala-Ala-Phe-Asn-PyrS2-3Thi-2NapA-Gln-NH2 | 1435 |
| I-1874 | Ac-PL3-Asp-Npg-B5-Asn-Thr-Ala-Ala-Phe-Asn-PyrS2-3Thi-Cha-Gln-NH2 | 1436 |
| I-1875 | Ac-PL3-Asp-Npg-B5-Asn-Thr-Ala-Ala-Phe-Asn-PyrS2-3Thi-Cha-Gln-NH2 | 1436 |
| I-1876 | Ac-PL3-Asp-Npg-B5-Asn-Thr-Ala-Ala-Phe-Asn-PyrS2-3Thi-Trp-Gln-NH2 | 1437 |
| I-1877 | Ac-PL3-Asp-Npg-B5-Asn-Thr-Ala-Ala-Phe-Asn-PyrS2-3Thi-Trp-Gln-NH2 | 1437 |
| I-1878 | Ac-PL3-Asp-Npg-B5-Asn-Thr-Ala-Ala-Phe-Asn-PyrS2-3Thi-BztA-Val-NH2 | 1438 |
| I-1879 | Ac-PL3-Asp-Npg-B5-Asn-Thr-Ala-Ala-Phe-Asn-PyrS2-3Thi-BztA-Val-NH2 | 1438 |
| I-1880 | Ac-PL3-Asp-Npg-B5-Asn-Thr-Ala-Ala-Phe-Asn-PyrS2-3Thi-BztA-Leu-NH2 | 1439 |
| I-1881 | Ac-PL3-Asp-Npg-B5-Asn-Thr-Ala-Ala-Phe-Asn-PyrS2-3Thi-BztA-Leu-NH2 | 1439 |
| I-1882 | Ac-PL3-Asp-Npg-B5-Asn-Thr-Ala-Ala-Phe-Arg-PyrS2-3Thi-BztA-Gln-NH2 | 1440 |
| I-1883 | Ac-PL3-Asp-Npg-B5-Asn-Thr-Ala-Ala-Phe-Arg-PyrS2-3Thi-BztA-Gln-NH2 | 1440 |
| I-1884 | Ac-PL3-Asp-Cha-B5-Asn-Thr-Ala-Ala-Phe-Asn-PyrS2-3Thi-BztA-Gln-NH2 | 1441 |
| I-1885 | Ac-PL3-Asp-Cha-B5-Asn-Thr-Ala-Ala-Phe-Asn-PyrS2-3Thi-BztA-Gln-NH2 | 1441 |
| I-1886 | Ac-PL3-Asp-Npg-B5-Arg-Asp-Ala-Ala-Phe-Asn-PyrS2-3Thi-BztA-Gln-NH2 | 1442 |
| I-1887 | Ac-PL3-Asp-Npg-B5-Arg-Asp-Ala-Ala-Phe-Asn-PyrS2-3Thi-BztA-Gln-NH2 | 1442 |
| I-1888 | Ac-PL3-Asp-Npg-B5-Arg-Thr-Ala-Ala-Phe-Asn-PyrS2-3Thi-BztA-Gln-NH2 | 1443 |
| I-1889 | Ac-PL3-Asp-Npg-B5-Arg-Thr-Ala-Ala-Phe-Asn-PyrS2-3Thi-BztA-Gln-NH2 | 1443 |
| I-1890 | Ac-PL3-Asp-Npg-B5-Asp-Arg-Ala-Ala-Phe-Asn-PyrS2-3Thi-BztA-Gln-NH2 | 1444 |
| I-1891 | Ac-PL3-Asp-Npg-B5-Asp-Arg-Ala-Ala-Phe-Asn-PyrS2-3Thi-BztA-Gln-NH2 | 1444 |
| I-1892 | Ac-PL3-Asp-Npg-B5-Asn-Arg-Ala-Ala-Phe-Asn-PyrS2-3Thi-BztA-Gln-NH2 | 1445 |
| I-1893 | Ac-PL3-Asp-Npg-B5-Asn-Arg-Ala-Ala-Phe-Asn-PyrS2-3Thi-BztA-Gln-NH2 | 1445 |
| I-1894 | Ac-PL3-Asp-Npg-B5-Asp-3COOHF-Ala-Ala-CypA-Leu-PyrS2-2C1F-BztA-Ser-NH2 | 1446 |
| I-1895 | Ac-PL3-Asp-Npg-B5-Asp-3COOHF-Ala-Ala-Cba-Leu-PyrS2-2C1F-BztA-Ser-NH2 | 1447 |
| I-1896 | Ac-PL3-Asp-Npg-B5-Asp-3COOHF-Ala-Ala-Phe-Leu-PyrS2-CypA-BztA-Ser-NH2 | 1448 |
| I-1897 | Ac-PL3-Asp-Npg-B5-Asp-3COOHF-Ala-Ala-Phe-Leu-PyrS2-Cba-BztA-Ser-NH2 | 1449 |
| I-1898 | Ac-PL3-Asp-Npg-B5-Asp-3COOHF-Ala-Ala-Phe-Leu-PyrS2-Cba-BztA-Ser-NH2 | 1449 |
| I-1899 | Ac-PL3-Asp-Npg-B5-Asp-3COOHF-Aib-Ala-Phe-Leu-PyrS2-2C1F-BztA-Ser-NH2 | 1450 |
| I-1900 | Ac-PL3-Asp-Npg-B5-Asp-3COOHF-Aib-Ala-Phe-Leu-PyrS2-2C1F-BztA-Ser-NH2 | 1450 |
| I-1901 | Ac-PL3-Asp-Npg-B5-Asp-3COOHF-Ser-Ala-Phe-Leu-PyrS2-2C1F-BztA-Ser-NH2 | 1451 |
| I-1902 | Ac-PL3-Asp-Npg-B5-Asp-3COOHF-Ser-Ala-Phe-Leu-PyrS2-2C1F-BztA-Ser-NH2 | 1451 |
| I-1903 | Ac-PL3-Asp-Npg-B5-Asp-3COOHF-Ala-Ala-Phe-Ser-PyrS2-2C1F-BztA-Ser-NH2 | 1452 |
| I-1904 | Ac-PL3-Asp-Npg-B5-Asp-3COOHF-Ala-Ala-Phe-Leu-PyrS2-2C1F-BztA-Asn-NH2 | 1453 |
| I-1905 | Ac-PL3-Asp-Npg-B5-Asp-3COOHF-Ala-Ala-Phe-Leu-PyrS2-2C1F-BztA-Ser-Thro1 | 1454 |
| I-1906 | Ac-PL3-Asp-Npg-B5-Asp-3COOHF-Ala-Ala-Phe-Leu-PyrS2-2C1F-BztA-Ser-Prool | 1455 |
| I-1907 | Ac-PL3-Asp-Npg-B5-Asp-3COOHF-Ala-Ala-Phe-Leu-PyrS2-2C1F-BztA-Ser-Alao1 | 1456 |
| I-1908 | Ac-PL3-Asp-Npg-B5-Asp-3COOHF-Ala-Ala-Phe-Leu-PyrS2-2C1F-BztA-Ser-NHEt | 1457 |
| I-1909 | Ac-PL3-Asp-Npg-B5-Asp-3COOHF-iPrLys-Ala-Phe-Leu-PyrS2-3Thi-BztA-Phe-NH2 | 1458 |
| I-1910 | Ac-PL3-Asp-Npg-B5-Asp-3COOHF-His-Ala-Phe-Leu-PyrS2-3Thi-BztA-Phe-NH2 | 1459 |
| I-1911 | Ac-PL3-Asp-Npg-B5-Asp-3COOHF-Lys-Ala-Phe-Leu-PyrS2-3Thi-BztA-Phe-NH2 | 1460 |
| I-1912 | Ac-PL3-Asp-Npg-B5-Asp-3COOHF-Gln-Ala-Phe-Leu-PyrS2-3Thi-BztA-Phe-NH2 | 1461 |
| I-1913 | Ac-PL3-Asp-Npg-B5-Asp-3COOHF-nLeu-Ala-Phe-Leu-PyrS2-3Thi-BztA-Phe-NH2 | 1462 |
| I-1914 | Ac-PL3-Asp-Npg-B5-Asp-3COOHF-Aib-Ala-Phe-Leu-PyrS2-3Thi-BztA-Phe-NH2 | 1463 |
| I-1915 | Ac-PL3-Asp-Npg-B5-Asp-3COOHF-iPrLys-Ala-Phe-Leu-PyrS2-3Thi-BztA-Ala-NH2 | 1464 |
| I-1916 | Ac-PL3-Asp-Npg-B5-Asp-3COOHF-His-Ala-Phe-Leu-PyrS2-3Thi-BztA-Ala-NH2 | 1465 |
| I-1917 | Ac-PL3-Asp-Npg-B5-Asp-3COOHF-Lys-Ala-Phe-Leu-PyrS2-3Thi-BztA-Ala-NH2 | 1466 |
| I-1918 | Ac-PL3-Asp-Npg-B5-Asp-3COOHF-Gln-Ala-Phe-Leu-PyrS2-3Thi-BztA-Ala-NH2 | 1467 |
| I-1919 | Ac-PL3-Asp-Npg-B5-Asp-3COOHF-nLeu-Ala-Phe-Leu-PyrS2-3Thi-BztA-Ala-NH2 | 1468 |
| I-1920 | Ac-PL3-Asp-Npg-B5-Asp-3COOHF-Aib-Ala-Phe-Leu-PyrS2-3Thi-BztA-Ala-NH2 | 1469 |
| I-1921 | Ac-PL3-Asp-Npg-B5-Asp-S3COOPipA-Ala-Ala-Phe-Leu-PyrS2-3Thi-BztA-Gln-NH2 | 1470 |
| I-1922 | Ac-PL3-Asn-Cha-B5-Asp-Gln-iPrLys-Ala-Phe-Hse-PyrS2-Phe-BztA-Hse-NH2 | 1471 |
| I-1923 | Ac-PL3-Asn-Cha-B5-Asp-Gln-iPrLys-Ala-3PyrA-Asn-PyrS2-Phe-BztA-Hse-NH2 | 1472 |
| I-1924 | Ac-PL3-Asn-Cha-B5-Asp-Gln-iPrLys-Ala-3C1F-Asn-PyrS2-Phe-BztA-Hse-NH2 | 1473 |
| I-1925 | Ac-PL3-Asn-Cha-B5-Asp-Gln-iPrLys-Ala-3cbmf-Asn-PyrS2-Phe-BztA-Hse-NH2 | 1474 |
| I-1926 | Ac-PL3-Asn-Cha-B5-Asp-Gln-iPrLys-Ala-3OMeF-Asn-PyrS2-Phe-BztA-Hse-NH2 | 1475 |
| I-1927 | Ac-PL3-Asn-Cha-B5-Asp-Gln-iPrLys-Ala-Phe-Asn-PyrS2-3PyrA-BztA-Hse-NH2 | 1476 |
| I-1928 | Ac-PL3-Asn-Cha-B5-Asp-Gln-iPrLys-Ala-Phe-Asn-PyrS2-3C1F-BztA-Hse-NH2 | 1477 |
| I-1929 | Ac-PL3-Asn-Cha-B5-Asp-Gln-iPrLys-Ala-Phe-Asn-PyrS2-3cbmf-BztA-Hse-NH2 | 1478 |
| I-1930 | Ac-PL3-Asn-Cha-B5-Asp-Gln-iPrLys-Ala-Phe-Asn-PyrS2-3OMeF-BztA-Hse-NH2 | 1479 |
| I-1931 | Ac-PL3-Asn-Cha-B5-Asp-Gln-iPrLys-Ser-Phe-Asn-PyrS2-Phe-BztA-Hse-NH2 | 1480 |
| I-1932 | Ac-PL3-Hse-Cha-B5-Asp-Gln-iPrLys-Ala-Phe-Asn-PyrS2-Phe-BztA-Hse-NH2 | 1481 |
| I-1933 | Ac-PL3-Asn-Cha-B5-Asp-Hse-iPrLys-Ala-Phe-Asn-PyrS2-Phe-BztA-Hse-NH2 | 1482 |
| I-1934 | Ac-PL3-Asp-Npg-B5-Asp-TfeGA-Ala-Ala-Phe-[H4IAP]GlnR-PyrS2-3Thi-BztA-Gln- | 1483 |
| | NH2 | |
| I-1935 | Ac-PL3-Asp-Npg-B5-Asp-TfeGA-Ala-Ala-Phe-[TfePpz]GlnR-PyrS2-3Thi-BztA-Gln- | 1484 |
| | NH2 | |
| I-1936 | Ac-PL3-Asp-Npg-B5-Asp-TfeGA-Ala-Ala-Phe-[Me2NPrPip]GlnR-PyrS2-3Thi-BztA- | 1485 |
| | Gln-NH2 | |
| I-1937 | Ac-PL3-Asp-Npg-B5-Asp-TfeGA-Ala-Ala-Phe-[4MePpzPip]GlnR-PyrS2-3Thi-BztA- | 1486 |
| | Gln-NH2 | |
| I-1938 | Ac-PL3-Asp-Npg-B5-Asp-TfeGA-Ala-Ala-Phe-[4PyPip]GlnR-PyrS2-3Thi-BztA-Gln- | 1487 |
| | NH2 | |
| I-1939 | Ac-PL3-Asp-Npg-B5-Asp-TfeGA-Ala-Ala-Phe-[RDMAPyr]GlnR-PyrS2-3Thi-BztA- | 1488 |
| | Gln-NH2 | |
| I-1940 | Ac-PL3-Asp-Npg-B5-Asp-TfeGA-Ala-Ala-Phe-[4Pippip]GlnR-PyrS2-3Thi-BztA-Gln- | 1489 |
| | NH2 | |
| I-1941 | Ac-PL3-Asp-Npg-B5-Asp-TfeGA-Ala-Ala-Phe-[Ppz]GlnR-PyrS2-3Thi-BztA-Gln-NH2 | 1490 |
| I-1942 | Ac-PL3-Asp-Npg-B5-Asp-TfeGA-Ala-Ala-Phe-[NHBn]GlnR-PyrS2-3Thi-BztA-Gln- | 1491 |
| | NH2 | |
| I-1943 | Ac-PL3-Asp-Npg-B5-Asp-TfeGA-Ala-Ala-Phe-[Morph]GlnR-PyrS2-3Thi-BztA-Gln- | 1492 |
| | NH2 | |
| I-1944 | Ac-PL3-Asp-Npg-B5-AspSH-Asp-Ala-Ala-Phe-Leu-PyrS2-3Thi-BztA-Gln-NH2 | 1493 |
| I-1945 | Ac-PL3-Asp-Npg-B5-AspSH-Asp-Ala-Ala-Phe-Leu-PyrS2-3Thi-BztA-Gln-NH2 | 1493 |
| I-1946 | Ac-PL3-Asp-Npg-B5-Asp-AspSH-Ala-Ala-Phe-Leu-PyrS2-3Thi-BztA-Gln-NH2 | 1494 |
| I-1947 | Ac-PL3-Asp-Npg-B5-Asp-AspSH-Ala-Ala-Phe-Leu-PyrS2-3Thi-BztA-Gln-NH2 | 1494 |
| I-1948 | Ac-PL3-Asp-Npg-B5-Asp-GluSH-Ala-Ala-Phe-Leu-PyrS2-3Thi-BztA-Gln-NH2 | 1495 |
| I-1949 | Ac-PL3-Asp-Npg-B5-Asp-GluSH-Ala-Ala-Phe-Leu-PyrS2-3Thi-BztA-Gln-NH2 | 1495 |
| I-1950 | Ac-PL3-Asp-Npg-B5-[EtSSpy]AspE-Asp-Ala-Ala-Phe-Leu-PyrS2-3Thi-BztA-Gln-NH2 | 1496 |
| I-1951 | Ac-PL3-Asp-Npg-B5-Asp-[EtSSpy]GluE-Ala-Ala-Phe-Leu-PyrS2-3Thi-BztA-Gln-NH2 | 1497 |
| I-1952 | Ac-PL3-[EtSSPh]AspE-Npg-B5-Asp-Asp-Ala-Ala-Phe-Leu-PyrS2-3Thi-BztA-Gln-NH2 | 1498 |
| I-1953 | Ac-PL3-[EtSSPh]AspE-Npg-B5-Asp-Asp-Ala-Ala-Phe-Leu-PyrS2-3Thi-BztA-Gln-NH2 | 1498 |
| I-1954 | Ac-PL3-Asp-Npg-B5-[EtSSPh]AspE-Asp-Ala-Ala-Phe-Leu-PyrS2-3Thi-BztA-Gln-NH2 | 1499 |
| I-1955 | Ac-PL3-Asp-Npg-B5-[EtSSPh]AspE-Asp-Ala-Ala-Phe-Leu-PyrS2-3Thi-BztA-Gln-NH2 | 1499 |
| I-1956 | Ac-PL3-Asp-Npg-B5-Asp-[EtSSPh]AspE-Ala-Ala-Phe-Leu-PyrS2-3Thi-BztA-Gln-NH2 | 1500 |
| I-1957 | Ac-PL3-Asp-Npg-B5-Asp-[EtSSPh]GluE-Ala-Ala-Phe-Leu-PyrS2-3Thi-BztA-Gln-NH2 | 1501 |
| I-1958 | Ac-PL3-Asp-Npg-B5-Asp-[EtSSPh]GluE-Ala-Ala-Phe-Leu-PyrS2-3Thi-BztA-Gln-NH2 | 1501 |
| I-1959 | Ac-PL3-[EtSSHex]AspE-Npg-B5-Asp-Asp-Ala-Ala-Phe-Leu-PyrS2-3Thi-BztA-Gln- | 1502 |
| | NH2 | |
| I-1960 | Ac-PL3-[EtSSHex]AspE-Npg-B5-Asp-Asp-Ala-Ala-Phe-Leu-PyrS2-3Thi-BztA-Gln- | 1502 |
| | NH2 | |
| I-1961 | Ac-PL3-Asp-Npg-B5-[EtSSHex]AspE-Asp-Ala-Ala-Phe-Leu-PyrS2-3Thi-BztA-Gln- | 1503 |
| | NH2 | |
| I-1962 | Ac-PL3-Asp-Npg-B5-Asp-[EtSSHex]AspE-Ala-Ala-Phe-Leu-PyrS2-3Thi-BztA-Gln- | 1504 |
| | NH2 | |
| I-1963 | Ac-PL3-[EtSSEt]AspE-Npg-B5-Asp-Asp-Ala-Ala-Phe-Leu-PyrS2-3Thi-BztA-Gln-NH2 | 1505 |
| I-1964 | Ac-PL3-Asp-Npg-B5-[EtSSEt]AspE-Asp-Ala-Ala-Phe-Leu-PyrS2-3Thi-BztA-Gln-NH2 | 1506 |
| I-1965 | Ac-PL3-Asp-Npg-B5-Asp-[EtSSEt]AspE-Ala-Ala-Phe-Leu-PyrS2-3Thi-BztA-Gln-NH2 | 1507 |
| I-1966 | Ac-PL3-Asp-Npg-B5-Asp-[EtSSEt]GluE-Ala-Ala-Phe-Leu-PyrS2-3Thi-BztA-Gln-NH2 | 1508 |
| I-1967 | Ac-PL3-Asp-Npg-B5-Asp-R3COOPipA-Ala-Ala-Phe-Leu-PyrS2-3Thi-BztA-Gln-NH2 | 1509 |
| I-1968 | Ac-PL3-Asp-Npg-B5-Asp-S2COOPipA-Ala-Ala-Phe-Leu-PyrS2-3Thi-BztA-Gln-NH2 | 1510 |
| I-1969 | Ac-PL3-Asp-Npg-B5-Asp-R2COOPipA-Ala-Ala-Phe-Leu-PyrS2-3Thi-BztA-Gln-NH2 | 1511 |
| I-1970 | Ac-PL3-Asp-Npg-B4-Asp-Asp-Ala-Ala-Phe-Leu-PyrS1-3Thi-BztA-Gln-NH2 | 1512 |
| I-1971 | Ac-PL3-Asp-Npg-B4-Asp-Asp-Ala-Ala-Phe-Leu-PyrS2-3Thi-BztA-Gln-NH2 | 1513 |
| I-1972 | Ac-PL3-Asp-Npg-B4-Asp-Asp-Ala-Ala-Phe-Leu-PyrS2-3Thi-BztA-Gln-NH2 | 1513 |
| I-1973 | Ac-PL3-Asp-Npg-B4-Asp-Asp-Ala-Ala-Phe-Leu-PyrS3-3Thi-BztA-Gln-NH2 | 1514 |
| I-1974 | Ac-PL3-Asp-Npg-B4-Asp-Asp-Ala-Ala-Phe-Leu-PyrS1-3Thi-BztA-Gln-NH2 | 1512 |
| I-1975 | Ac-PL3-Asp-Npg-B4-Asp-Asp-Ala-Ala-Phe-Leu-PyrS2-3Thi-BztA-Gln-NH2 | 1513 |
| I-1976 | Ac-PL3-Asp-Npg-B4-Asp-Asp-Ala-Ala-Phe-Leu-PyrS3-3Thi-BztA-Gln-NH2 | 1514 |
| I-1977 | Ac-PL3-Asp-Npg-S6-Asp-Asp-Ala-Ala-Phe-Leu-Aib-3Thi-BztA-Gln-NH2 | 1515 |
| I-1978 | Ac-PL3-Asp-Npg-S6-Asp-Asp-Ala-Ala-Phe-Leu-Aib-3Thi-BztA-Gln-NH2 | 1515 |
| I-1979 | Ac-PL3-Asp-Npg-S4-Asp-Asp-Ala-Ala-Phe-Leu-Aib-3Thi-BztA-Gln-NH2 | 1516 |
| I-1980 | Ac-PL3-Asp-Npg-S3-Asp-Asp-Ala-Ala-Phe-Leu-Aib-3Thi-BztA-Gln-NH2 | 1517 |
| I-1981 | Ac-PL3-Asp-Npg-S6-Asp-Asp-Ala-Ala-Phe-Leu-Aib-3Thi-BztA-Gln-NH2 | 1515 |
| I-1982 | Ac-PL3-Asp-Npg-S4-Asp-Asp-Ala-Ala-Phe-Leu-Aib-3Thi-BztA-Gln-NH2 | 1516 |
| I-1983 | Ac-PL3-Asp-Npg-S3-Asp-Asp-Ala-Ala-Phe-Leu-Aib-3Thi-BztA-Gln-NH2 | 1517 |
| I-1984 | ProAm5-Asp-Npg-B5-Asp-3COOHF-Ala-Ala-Phe-Leu-PyrS2-2C1F-BztA-Gln-NH2 | 1518 |
| I-1985 | ProAm6-Asp-Npg-B5-Asp-3COOHF-Ala-Ala-Phe-Leu-PyrS2-2C1F-BztA-Gln-NH2 | 1519 |
| I-1986 | ProAm6-Asp-Npg-B5-Asp-TfeGA-Ala-Ala-Phe-Thr-PyrS2-2C1F-BztA-Gln-NH2 | 1520 |
| I-1987 | Ac-PL3-Asp-Npg-B5-Asp-Asp-Ala-Ala-Phe-Asn-PyrS2-3Thi-BztA-Gln-NH2 | 448 |
| I-1988 | Ac-Pro-Asp-Npg-R6-Asp-Asp-Ala-Ala-Phe-Leu-PyrS2-3Thi-BztA-Gln-NH2 | 1521 |
| I-1989 | Ac-Pro-Asp-Npg-R4-Asp-Asp-Ala-Ala-Phe-Leu-PyrS2-3Thi-BztA-Gln-NH2 | 1522 |
| I-1990 | Ac-Pro-Asp-Npg-R3-Asp-Asp-Ala-Ala-Phe-Leu-PyrS2-3Thi-BztA-Gln-NH2 | 1523 |
| I-1991 | Ac-Pro-Asp-Npg-R6-Asp-Asp-Ala-Ala-Phe-Leu-PyrS2-3Thi-BztA-Gln-NH2 | 1521 |
| I-1992 | Ac-Pro-Asp-Npg-R4-Asp-Asp-Ala-Ala-Phe-Leu-PyrS2-3Thi-BztA-Gln-NH2 | 1522 |
| I-1993 | Ac-Pro-Asp-Npg-R3-Asp-Asp-Ala-Ala-Phe-Leu-PyrS2-3Thi-BztA-Gln-NH2 | 1523 |
| I-1994 | Ac-PL3-Asp-Npg-B5-Asn-Thr-Ala-Ala-Phe-Asn-PyrS2-hPhe-BztA-Gln-NH2 | 1524 |
| I-1995 | Ac-PL3-Asp-Npg-B5-Asn-Thr-Ala-Ala-Phe-Asn-PyrS2-hPhe-BztA-Gln-NH2 | 1524 |
| I-1996 | Ac-PL3-Asp-Npg-B5-Asn-Thr-Ala-Ala-Phe-Asn-PyrS2-3F3MeF-BztA-Gln-NH2 | 1525 |
| I-1997 | Ac-PL3-Asp-Npg-B5-Asn-Thr-Ala-Ala-Phe-Asn-PyrS2-3F3MeF-BztA-Gln-NH2 | 1525 |
| I-1998 | Ac-PL3-Asp-Npg-B5-Asn-Thr-Ala-Ala-Phe-Asn-PyrS2-2C1F-BztA-Gln-NH2 | 1526 |
| I-1999 | Ac-PL3-Asp-Npg-B5-Asn-Thr-Ala-Ala-Phe-Asn-PyrS2-2C1F-BztA-Gln-NH2 | 1526 |
| I-2000 | Ac-PL3-Asp-Npg-B5-Asn-Thr-Ala-Ala-Phe-Asn-PyrS2-3C1F-BztA-Gln-NH2 | 1527 |
| I-2001 | Ac-PL3-Asp-Npg-B5-Asn-Thr-Ala-Ala-Phe-Asn-PyrS2-3C1F-BztA-Gln-NH2 | 1527 |
| I-2002 | Ac-PL3-Asp-Ala-B5-Asn-Thr-Ala-Ala-Phe-Asn-PyrS2-3Thi-BztA-Gln-NH2 | 1528 |
| I-2003 | Ac-PL3-Asp-Ala-B5-Asn-Thr-Ala-Ala-Phe-Asn-PyrS2-3Thi-BztA-Gln-NH2 | 1528 |
| I-2004 | Ac-PL3-Asp-Npg-B5-Asn-Thr-iPrLys-Ala-Phe-Asn-PyrS2-3Thi-BztA-Gln-NH2 | 1529 |
| I-2005 | Ac-PL3-Asp-Npg-B5-Asn-Thr-iPrLys-Ala-Phe-Asn-PyrS2-3Thi-BztA-Gln-NH2 | 1529 |
| I-2006 | Ac-PL3-Asp-Npg-B5-Asn-Thr-Ala-iPrLys-Phe-Asn-PyrS2-3Thi-BztA-Gln-NH2 | 1530 |
| I-2007 | Ac-PL3-Asp-Npg-B5-Asn-Thr-Ala-Ala-hPhe-Asn-PyrS2-3Thi-BztA-Gln-NH2 | 1531 |
| I-2008 | Ac-PL3-Asp-Npg-B5-Asn-Thr-Ala-Ala-hPhe-Asn-PyrS2-3Thi-BztA-Gln-NH2 | 1531 |
| I-2009 | Ac-PL3-Asp-Npg-B5-Asn-Thr-Ala-Ala-3F3MeF-Asn-PyrS2-3Thi-BztA-Gln-NH2 | 1532 |
| I-2010 | Ac-PL3-Asp-Npg-B5-Asn-Thr-Ala-Ala-3F3MeF-Asn-PyrS2-3Thi-BztA-Gln-NH2 | 1532 |
| I-2011 | Ac-PL3-Asp-Npg-B5-Asn-Thr-Ala-Ala-2C1F-Asn-PyrS2-3Thi-BztA-Gln-NH2 | 1533 |
| I-2012 | Ac-PL3-Asp-Npg-B5-Asn-Thr-Ala-Ala-2C1F-Asn-PyrS2-3Thi-BztA-Gln-NH2 | 1533 |
| I-2013 | Ac-PL3-Asp-Npg-B5-Asn-Thr-Ala-Ala-3C1F-Asn-PyrS2-3Thi-BztA-Gln-NH2 | 1534 |
| I-2014 | Ac-PL3-Asp-Npg-B5-Asn-Thr-Ala-Ala-3C1F-Asn-PyrS2-3Thi-BztA-Gln-NH2 | 1534 |
| I-2015 | Ac-PL3-Asp-Npg-B5-Asn-Thr-Ala-Ala-Tyr-Asn-PyrS2-3Thi-BztA-Gln-NH2 | 1535 |
| I-2016 | Ac-PL3-Asp-Npg-B5-Asn-Thr-Ala-Ala-Tyr-Asn-PyrS2-3Thi-BztA-Gln-NH2 | 1535 |
| I-2017 | Ac-PL3-Asp-Npg-B5-Asp-Asp-Ala-Ala-Phe-Asn-PyrR2-3Thi-BztA-Gln-NH2 | 1536 |
| I-2018 | Ac-PL3-Asp-Npg-B5-Asp-Asp-Ala-Ala-Phe-Asn-PyrR2-3Thi-BztA-Gln-NH2 | 1536 |
| I-2019 | Ac-PL3-Asp-Npg-B5-Asp-Asp-Ala-Ala-Phe-Leu-PyrR2-3Thi-BztA-Gln-NH2 | 1537 |
| I-2020 | Ac-PL3-Asp-Npg-B5-Asp-Asp-Ala-Ala-Phe-Leu-PyrR2-3Thi-BztA-Gln-NH2 | 1537 |
| I-2021 | Ac-PL3-Asp-Npg-B5-Asp-Asp-Ala-Ala-Phe-Asn-PyrR2-3Thi-BztA-Gln-NH2 | 1536 |
| I-2022 | Ac-PL3-Asp-Npg-B5-Asp-Asp-Ala-Ala-Phe-Leu-PyrR2-3Thi-BztA-Gln-NH2 | 1537 |
| I-2023 | Ac-PL3-Asp-Npg-B5-Asp-3COOHF-Ala-Ala-Phe-Ala-PyrS2-2C1F-BztA-Ala-NH2 | 1538 |
| I-2024 | Ac-PL3-Asp-Npg-B5-Asp-3COOHF-Ala-Ala-Phe-Ala-PyrS2-2C1F-BztA-Val-NH2 | 1539 |
| I-2025 | Ac-PL3-Asp-Npg-B5-Asp-3COOHF-Ala-Ala-Phe-Ala-PyrS2-2C1F-BztA-Phe-NH2 | 1540 |
| I-2026 | Ac-PL3-Asp-Npg-B5-Asp-3COOHF-Ala-Ala-Phe-Ala-PyrS2-2C1F-BztA-dAla-NH2 | 1541 |
| I-2027 | Ac-PL3-Asp-Npg-B5-Asp-3COOHF-Ala-Ala-Phe-Ser-PyrS2-2C1F-BztA-Ala-NH2 | 1542 |
| I-2028 | Ac-PL3-Asp-Npg-B5-Asp-3COOHF-Ala-Ala-Phe-Ser-PyrS2-2C1F-BztA-Val-NH2 | 1543 |
| I-2029 | Ac-PL3-Asp-Npg-B5-Asp-3COOHF-Ala-Ala-Phe-Ser-PyrS2-2C1F-BztA-Phe-NH2 | 1544 |
| I-2030 | Ac-PL3-Asp-Npg-B5-Asp-3COOHF-Ala-Ala-Phe-Ser-PyrS2-2C1F-BztA-dAla-NH2 | 1545 |
| I-2031 | Ac-PL3-Asp-Npg-B5-Asp-3COOHF-Ala-Ala-Phe-Asn-PyrS2-2C1F-BztA-Ala-NH2 | 1546 |
| I-2032 | Ac-PL3-Asp-Npg-B5-Asp-3COOHF-Ala-Ala-Phe-Asn-PyrS2-2C1F-BztA-Val-NH2 | 1547 |
| I-2033 | Ac-PL3-Asp-Npg-B5-Asp-3COOHF-Ala-Ala-Phe-Asn-PyrS2-2C1F-BztA-Phe-NH2 | 1548 |
| I-2034 | Ac-PL3-Asp-Npg-B5-Asp-3COOHF-Ala-Ala-Phe-Asn-PyrS2-2C1F-BztA-dAla-NH2 | 1549 |
| I-2035 | Ac-PL3-Asp-Npg-B5-Asp-3COOHF-Ala-Ala-Phe-Ala-PyrS2-2C1F-BztA-Asn-NH2 | 1550 |
| I-2036 | Ac-PL3-Asp-Npg-B5-Asp-3COOHF-Ala-Ala-Phe-Ala-PyrS2-2C1F-BztA-Asn-NH2 | 1550 |
| I-2037 | Ac-PL3-Asp-Npg-B5-Asp-3COOHF-Ala-Ala-Phe-Phe-PyrS2-2C1F-BztA-Asn-NH2 | 1551 |
| I-2038 | Ac-PL3-Asp-Npg-B5-Asp-3COOHF-Ala-Ala-Phe-Ser-PyrS2-2C1F-BztA-Asn-NH2 | 1552 |
| I-2039 | Ac-PL3-Asp-Npg-B5-Asp-3COOHF-Ala-Ala-Phe-Ser-PyrS2-2C1F-BztA-Asn-NH2 | 1552 |
| I-2040 | Ac-PL3-Asp-Npg-B5-Asp-3COOHF-Ala-Ala-Phe-Leu-PyrS2-2C1F-BztA-Asn-Ala-Ala- | 1553 |
| | Ala-NH2 | |
| I-2041 | Ac-PL3-Asp-Npg-B5-Asp-3COOHF-Ala-Ala-Phe-Leu-PyrS2-2C1F-BztA-Asn-Ala-Ala- | 1554 |
| | dAla-NH2 | |
| I-2042 | Ac-PL3-Asp-Npg-B5-Asp-3COOHF-Ala-Ala-Phe-Ala-PyrS2-3Thi-BztA-Asn-NH2 | 1555 |
| I-2043 | Ac-PL3-Asp-Npg-B5-Asp-3COOHF-Ala-Ala-Phe-Leu-PyrS2-3Thi-BztA-Asn-NH2 | 1556 |
| I-2044 | Ac-PL3-Asp-Npg-B5-Asp-3COOHF-Ala-Ala-Phe-Phe-PyrS2-3Thi-BztA-Asn-NH2 | 1557 |
| I-2045 | Ac-PL3-Asp-Npg-B5-Asp-3COOHF-Ala-Ala-Phe-Ser-PyrS2-3Thi-BztA-Asn-NH2 | 1558 |
| I-2046 | Ac-PL3-Asp-Npg-B5-Asp-3COOHF-Ala-Ala-Phe-Leu-PyrS2-3Thi-BztA-Asn-Ala-Ala- | 1559 |
| | Ala-NH2 | |
| I-2047 | Ac-PL3-Asp-Npg-B5-Asp-3COOHF-Ala-Ala-Phe-Leu-PyrS2-3Thi-BztA-Asn-Ala-Ala- | 1560 |
| | dAla-NH2 | |
| I-2048 | Ac-PL3-Asp-Npg-B5-Asp-TfeGA-Ala-Ala-3CH2NMe2F-Leu-PyrS2-3Thi-BztA-Gln- | 1561 |
| | NH2 | |
| I-2049 | Ac-PL3-Asp-Npg-B5-Asp-3COOHF-Asn-Ala-Phe-Leu-PyrS2-3Thi-BztA-Ala-NH2 | 1562 |
| I-2050 | Ac-PL3-Asp-Npg-B5-Asp-3COOHF-Ser-Ala-Phe-Leu-PyrS2-3Thi-BztA-Ala-NH2 | 1563 |
| I-2051 | Ac-PL3-Asp-Npg-B5-Asp-3COOHF-Thr-Ala-Phe-Leu-PyrS2-3Thi-BztA-Ala-NH2 | 1564 |
| I-2052 | Ac-PL3-Asp-Npg-B5-Asp-3COOHF-Gln-Ala-Phe-Phe-PyrS2-3Thi-BztA-Ala-NH2 | 1565 |
| I-2053 | Ac-PL3-Asp-Npg-B5-Asp-3COOHF-Gln-Ala-Phe-Ala-PyrS2-3Thi-BztA-Ala-NH2 | 1566 |
| I-2054 | Ac-PL3-Asp-Npg-B5-Asp-3COOHF-Gln-Ala-Phe-Val-PyrS2-3Thi-BztA-Ala-NH2 | 1567 |
| I-2055 | Ac-PL3-Asp-Npg-B5-Asp-3COOHF-Gln-Ala-Phe-Leu-PyrS2-3Thi-BztA-Val-NH2 | 1568 |
| I-2056 | Ac-PL3-Asp-Npg-B5-Asp-3COOHF-Gln-Ala-Phe-Leu-PyrS2-3Thi-BztA-Leu-NH2 | 1569 |
| I-2057 | Ac-PL3-Asp-Npg-B5-Asp-3COOHF-Gln-Ala-Phe-Leu-PyrS2-2F3MeF-BztA-Ala-NH2 | 1570 |
| I-2058 | Ac-PL3-Asp-Npg-B5-Asp-3COOHF-Asn-Ala-Phe-Leu-PyrS2-2F3MeF-BztA-Ala-NH2 | 1571 |
| I-2059 | Ac-PL3-Asp-Npg-B5-Asp-3COOHF-Ser-Ala-Phe-Leu-PyrS2-2F3MeF-BztA-Ala-NH2 | 1572 |
| I-2060 | Ac-PL3-Asp-Npg-B5-Asp-3COOHF-Thr-Ala-Phe-Leu-PyrS2-2F3MeF-BztA-Ala-NH2 | 1573 |
| I-2061 | Ac-PL3-Asp-Npg-B5-Asp-3COOHF-Ala-Ala-Phe-Leu-PyrS2-3Thi-BztA-Met2O-NH2 | 1574 |
| I-2062 | Ac-PL3-Asp-Npg-B5-Asp-3COOHF-Ala-Ala-Phe-Leu-PyrS2-2C1F-BztA-Met2O-NH2 | 1575 |
| I-2063 | Ac-PL3-Asp-Npg-B5-Asp-3COOHF-Ala-Ala-Phe-Leu-PyrS2-2F3MeF-BztA-Met2O- | 1576 |
| | NH2 | |
| I-2064 | Ac-PL3-Asp-Npg-B5-Asp-3COOHF-Met2O-Ala-Phe-Leu-PyrS2-3Thi-BztA-Ala-NH2 | 1577 |
| I-2065 | Ac-PL3-Asn-Cha-B5-Asp-Gln-iPrLys-Ala-Phe-Asn-PyrS2-Phe-BztA-Ala-NH2 | 1578 |
| I-2066 | Ac-PL3-Asn-Cha-B5-Asp-Gln-His-Ala-Phe-Asn-PyrS2-Phe-BztA-Hse-NH2 | 1579 |
| I-2067 | Ac-PL3-Asn-Cha-B5-Asp-Gln-Gln-Ala-Phe-Asn-PyrS2-Phe-BztA-Hse-NH2 | 1580 |
| I-2068 | Ac-PL3-Asn-Cha-B5-Asp-Gln-iPrLys-Ala-Phe-Asn-PyrS2-Phe-BztA-Phe-NH2 | 1581 |
| I-2069 | Ac-PL3-Asn-Cha-B5-Asp-Gln-His-Ala-Phe-Asn-PyrS2-Phe-BztA-Ala-NH2 | 1582 |
| I-2070 | Ac-PL3-Asn-Cha-B5-Asp-Gln-Gln-Ala-Phe-Asn-PyrS2-Phe-BztA-Ala-NH2 | 1583 |
| I-2071 | Ac-PL3-Asn-Cha-B5-Asp-Gln-iPrLys-Ala-Phe-Asn-PyrS2-4Thz-BztA-Hse-NH2 | 1584 |
| I-2072 | Ac-PL3-Asn-Cha-B5-Asp-Gln-iPrLys-Ala-4Thz-Asn-PyrS2-Phe-BztA-Hse-NH2 | 1585 |
| I-2073 | Ac-PL3-Asn-Cha-B5-Asp-Gln-iPrLys-Ala-Phe-Asn-PyrS2-Phe-BztA-NH2 | 1586 |
| I-2074 | Ac-PL3-Asn-Cha-B5-Asp-Gln-iPrLys-Ala-Phe-Asn-PyrS2-3Thi-BztA-Hse-NH2 | 1587 |
| I-2075 | Ac-PL3-Asn-Cha-B5-Asp-Gln-iPrLys-Ala-Phe-Asn-PyrS2-2Thi-BztA-Hse-NH2 | 1588 |
| I-2076 | Ac-PL3-Asp-Npg-B5-Asp-[CH2CH2CO2H]TriAzDab-Ala-Ala-Phe-Leu-PyrS2-3Thi- | 1589 |
| | BztA-Gln-NH2 | |
| I-2077 | Ac-PL3-Asp-Npg-B5-Asp-[CH2CMe2CO2H]TriAzDab-Ala-Ala-Phe-Leu-PyrS2-3Thi- | 1590 |
| | BztA-Gln-NH2 | |
| I-2078 | Ac-PL3-Asp-Npg-B5-Asp-[CH2CO2H]TriAzDab-Ala-Ala-Phe-Leu-PyrS2-3Thi-BztA- | 1591 |
| | Gln-NH2 | |
| I-2079 | Ac-PL3-Asp-Npg-B5-Asp-[CMe2CO2H]TriAzDab-Ala-Ala-Phe-Leu-PyrS2-3Thi- | 1592 |
| | BztA-Gln-NH2 | |
| I-2080 | Ac-PL3-Asp-Npg-B5-Asp-[2COOHPh]TriAzDab-Ala-Ala-Phe-Leu-PyrS2-3Thi-BztA- | 1593 |
| | Gln-NH2 | |
| I-2081 | Ac-PL3-Asp-Npg-B5-Asp-[2COOHPh]TriAzDab-Ala-Ala-Phe-Leu-PyrS2-3Thi-BztA- | 1593 |
| | Gln-NH2 | |
| I-2082 | Ac-PL3-Asp-Npg-B5-Asp-[CH2CH2CO2H]TriAzDap-Ala-Ala-Phe-Leu-PyrS2-3Thi- | 1594 |
| | BztA-Gln-NH2 | |
| I-2083 | Ac-PL3-Asp-Npg-B5-Asp-[CH2CMe2CO2H]TriAzDap-Ala-Ala-Phe-Leu-PyrS2-3Thi- | 1595 |
| | BztA-Gln-NH2 | |
| I-2084 | Ac-PL3-Asp-Npg-B5-Asp-[CH2CO2H]TriAzDap-Ala-Ala-Phe-Leu-PyrS2-3Thi-BztA- | 1596 |
| | Gln-NH2 | |
| I-2085 | Ac-PL3-Asp-Npg-B5-Asp-[CMe2CO2H]TriAzDap-Ala-Ala-Phe-Leu-PyrS2-3Thi- | 1597 |
| | BztA-Gln-NH2 | |
| I-2086 | Ac-PL3-Asp-Npg-B5-Asp-[2COOHPh]TriAzDap-Ala-Ala-Phe-Leu-PyrS2-3Thi-BztA- | 1598 |
| | Gln-NH2 | |
| I-2087 | Ac-PL3-Asp-Npg-B5-Asp-[2COOH4NH2Ph]Dap-Ala-Ala-Phe-Leu-PyrS2-3Thi-BztA- | 1599 |
| | Gln-NH2 | |
| I-2088 | Ac-PL3-Asp-Npg-B5-Asp-3COOHF-Ala-Ala-Phe-Leu-PyrS2-3Thi-BztA-dGln-NH2 | 1600 |
| I-2089 | Ac-PL3-Asp-Npg-B5-Asp-3COOHF-Ala-Ala-Phe-Leu-PyrS2-2F3MeF-BztA-dGln-NH2 | 1601 |
| I-2090 | Ac-PL3-Asp-Npg-B5-Asp-3COOHF-Ala-Ala-Phe-Leu-PyrS2-3Thi-BztA-dAla-NH2 | 1602 |
| I-2091 | Ac-PL3-Asp-Npg-B5-Asp-3COOHF-Ala-Ala-Phe-Leu-PyrS2-2F3MeF-BztA-dAla-NH2 | 1603 |
| I-2092 | Ac-PL3-Asp-Npg-B5-Asp-3COOHF-Ala-Ala-Phe-Phe-PyrS2-3Thi-BztA-dGln-NH2 | 1604 |
| I-2093 | Ac-PL3-Asp-Npg-B5-Asp-3COOHF-Ala-Ala-Phe-Phe-PyrS2-2F3MeF-BztA-dGln-NH2 | 1605 |
| I-2094 | Ac-PL3-Asp-Npg-B5-Asp-3COOHF-Ala-Ala-Phe-Phe-PyrS2-3Thi-BztA-dAla-NH2 | 1606 |
| I-2095 | Ac-PL3-Asp-Npg-B5-Asp-3COOHF-Ala-Ala-Phe-Phe-PyrS2-2F3MeF-BztA-dAla-NH2 | 1607 |
| I-2096 | Ac-PL3-Asp-Npg-B5-Asp-3COOHF-Ala-dAla-Phe-Leu-PyrS2-3Thi-BztA-Ala-NH2 | 1608 |
| I-2097 | Ac-PL3-Asp-Npg-B5-Asp-3COOHF-Ala-dAla-Phe-Leu-PyrS2-3Thi-BztA-Ala-NH2 | 1608 |
| I-2098 | Ac-PL3-Asp-Npg-B5-Asp-3COOHF-Ala-dAla-Phe-Leu-PyrS2-2F3MeF-BztA-Ala-NH2 | 1609 |
| I-2099 | Ac-PL3-Asp-Npg-B5-Asp-3COOHF-Ala-dAla-Phe-Leu-PyrS2-2F3MeF-BztA-Ala-NH2 | 1609 |
| I-2100 | Ac-PL3-Asp-Npg-B5-Asp-3COOHF-Ala-dAla-Phe-Leu-PyrS2-3Thi-BztA-dAla-NH2 | 1610 |
| I-2101 | Ac-PL3-Asp-Npg-B5-Asp-3COOHF-Ala-dAla-Phe-Leu-PyrS2-2F3MeF-BztA-dAla- | 1611 |
| | NH2 | |
| I-2102 | Ac-PL3-Asn-Cha-B5-Asp-Gln-iPrLys-Ala-Phe-iPrLys-PyrS2-Phe-BztA-Hse-NH2 | 1612 |
| I-2103 | Ac-PL3-Ser-Cha-B5-Asp-Gln-iPrLys-Ala-Phe-Asn-PyrS2-Phe-BztA-Hse-NH2 | 1613 |
| I-2104 | Ac-PL3-Thr-Cha-B5-Asp-Gln-iPrLys-Ala-Phe-Asn-PyrS2-Phe-BztA-Hse-NH2 | 1614 |
| I-2105 | Ac-PL3-Gln-Cha-B5-Asp-Gln-iPrLys-Ala-Phe-Asn-PyrS2-Phe-BztA-Hse-NH2 | 1615 |
| I-2106 | Ac-PL3-His-Cha-B5-Asp-Gln-iPrLys-Ala-Phe-Asn-PyrS2-Phe-BztA-Hse-NH2 | 1616 |
| I-2107 | Ac-PL3-4Thz-Cha-B5-Asp-Gln-iPrLys-Ala-Phe-Asn-PyrS2-Phe-BztA-Hse-NH2 | 1617 |
| I-2108 | Ac-PL3-4Tria-Cha-B5-Asp-Gln-iPrLys-Ala-Phe-Asn-PyrS2-Phe-BztA-Hse-NH2 | 1618 |
| I-2109 | Ac-PL3-Asn-Cha-B5-Asp-Gln-iPrLys-Ala-Phe-Asn-PyrS2-Phe-BztA-His-NH2 | 1619 |
| I-2110 | Ac-PL3-Asn-Cha-B5-Asp-Gln-iPrLys-Ala-Phe-Asn-PyrS2-Phe-BztA-Lys-NH2 | 1620 |
| I-2111 | Ac-PL3-Asn-Cha-B5-Asp-Gln-iPrLys-Ala-Phe-Asn-PyrS2-Phe-BztA-Asn-NH2 | 1621 |
| I-2112 | Ac-PL3-Asn-Cha-B5-Asp-Gln-iPrLys-Ala-Phe-Asn-PyrS2-Phe-BztA-Thr-NH2 | 1622 |
| I-2113 | Ac-PL3-Asn-Cha-B5-Asp-Gln-iPrLys-Ala-Phe-Asn-PyrS2-Phe-BztA-Gln-NH2 | 1623 |
| I-2114 | Ac-PL3-Asp-Npg-B5-Asp-hTyr-Ala-Ala-3COOHF-Asn-PyrS2-3Thi-BztA-Gln-NH2 | 1624 |
| I-2115 | Ac-PL3-Asp-Npg-B5-Asp-hTyr-Ala-Ala-3COOHF-Asn-PyrS2-3Thi-BztA-Gln-NH2 | 1624 |
| I-2116 | Ac-PL3-Asp-Npg-B5-Asp-hTyr-Ala-Ala-3COOHF-Hse-PyrS2-3Thi-BztA-Gln-NH2 | 1625 |
| I-2117 | Ac-PL3-Asp-Npg-B5-Asp-hTyr-Ala-Ala-3COOHF-Hse-PyrS2-3Thi-BztA-Gln-NH2 | 1625 |
| I-2118 | Ac-PL3-Asp-Npg-B5-Asp-His-Ala-Ala-3COOHF-Asn-PyrS2-3Thi-BztA-Gln-NH2 | 1626 |
| I-2119 | Ac-PL3-Asp-Npg-B5-Asp-His-Ala-Ala-3COOHF-Asn-PyrS2-3Thi-BztA-Gln-NH2 | 1626 |
| I-2120 | Ac-PL3-Asp-Npg-B5-Asp-His-Ala-Ala-3COOHF-Hse-PyrS2-3Thi-BztA-Gln-NH2 | 1627 |
| I-2121 | Ac-PL3-Asp-Npg-B5-Asp-His-Ala-Ala-3COOHF-Hse-PyrS2-3Thi-BztA-Gln-NH2 | 1627 |
| I-2122 | Ac-PL3-Asp-Npg-B5-Asp-His-Ala-Ala-3COOHF-Leu-PyrS2-3Thi-BztA-Gln-NH2 | 1628 |
| I-2123 | Ac-PL3-Asp-Npg-B5-Asp-His-Ala-Ala-3COOHF-Leu-PyrS2-3Thi-BztA-Gln-NH2 | 1628 |
| I-2124 | Ac-PL3-Asp-Npg-B5-Asp-Tyr-Ala-Ala-3COOHF-Hse-PyrS2-3Thi-BztA-Gln-NH2 | 1629 |
| I-2125 | Ac-PL3-Asp-Npg-B5-Asp-Tyr-Ala-Ala-3COOHF-Hse-PyrS2-3Thi-BztA-Gln-NH2 | 1629 |
| I-2126 | Ac-PL3-Asp-Npg-B5-Asp-Tyr-Ala-Ala-3COOHF-Leu-PyrS2-3Thi-BztA-Gln-NH2 | 1630 |
| I-2127 | Ac-PL3-Asp-Npg-B5-Asp-Trp-Ala-Ala-3COOHF-Asn-PyrS2-3Thi-BztA-Gln-NH2 | 1631 |
| I-2128 | Ac-PL3-Asp-Npg-B5-Asp-Trp-Ala-Ala-3COOHF-Hse-PyrS2-3Thi-BztA-Gln-NH2 | 1632 |
| I-2129 | Ac-PL3-Asp-Npg-B5-Asp-Trp-Ala-Ala-3COOHF-Leu-PyrS2-3Thi-BztA-Gln-NH2 | 1633 |
| I-2130 | Ac-PL3-TfeGA-Npg-B5-Asn-Thr-Ala-Ala-Phe-Asn-PyrS2-3Thi-BztA-Gln-NH2 | 1634 |
| I-2131 | Ac-PL3-TfeGA-Npg-B5-Asn-Thr-Ala-Ala-Phe-Asn-PyrS2-3Thi-BztA-Gln-NH2 | 1634 |
| I-2132 | Ac-PL3-Aad-Npg-B5-Asn-Thr-Ala-Ala-Phe-Asn-PyrS2-3Thi-BztA-Gln-NH2 | 1635 |
| I-2133 | Ac-PL3-Aad-Npg-B5-Asn-Thr-Ala-Ala-Phe-Asn-PyrS2-3Thi-BztA-Gln-NH2 | 1635 |
| I-2134 | Ac-PL3-3COOHF-Npg-B5-Asn-Thr-Ala-Ala-Phe-Asn-PyrS2-3Thi-BztA-Gln-NH2 | 1636 |
| I-2135 | Ac-PL3-3COOHF-Npg-B5-Asn-Thr-Ala-Ala-Phe-Asn-PyrS2-3Thi-BztA-Gln-NH2 | 1636 |
| I-2136 | Ac-PL3-2COOHF-Npg-B5-Asn-Thr-Ala-Ala-Phe-Asn-PyrS2-3Thi-BztA-Gln-NH2 | 1637 |
| I-2137 | Ac-PL3-2COOHF-Npg-B5-Asn-Thr-Ala-Ala-Phe-Asn-PyrS2-3Thi-BztA-Gln-NH2 | 1637 |
| I-2138 | Ac-PL3-Asp-Npg-B5-Asn-Thr-Ala-Ala-Phe-Asn-PyrS2-3Thi-BztA-Trp-NH2 | 1638 |
| I-2139 | Ac-PL3-Asp-Npg-B5-Asn-Thr-Ala-Ala-Phe-Asn-PyrS2-3Thi-BztA-Trp-NH2 | 1638 |
| I-2140 | Ac-PL3-Asp-Npg-B5-Asn-Thr-Ala-Ala-Phe-Asn-PyrS2-3Thi-BztA-His-NH2 | 1639 |
| I-2141 | Ac-PL3-Asp-Npg-B5-Asn-Thr-Ala-Ala-Phe-Asn-PyrS2-3Thi-BztA-His-NH2 | 1639 |
| I-2142 | Ac-PL3-Asp-Npg-B5-Asn-Thr-Ala-Ala-Phe-Asn-PyrS2-3Thi-BztA-Ala-NH2 | 1640 |
| I-2143 | Ac-PL3-Asp-Npg-B5-Asn-Thr-Ala-Ala-Phe-Asn-PyrS2-3Thi-BztA-Ala-NH2 | 1640 |
| I-2144 | Ac-PL3-Asp-Npg-B5-Asn-Thr-Ala-Ala-Phe-Thr-PyrS2-3Thi-BztA-Phe-NH2 | 1641 |
| I-2145 | Ac-PL3-Asp-Npg-B5-Asn-Thr-Ala-Ala-Phe-Thr-PyrS2-3Thi-BztA-Phe-NH2 | 1641 |
| I-2146 | Ac-PL3-Asp-Npg-B5-Asn-Thr-Ala-Ala-Phe-His-PyrS2-3Thi-BztA-Gln-NH2 | 1642 |
| I-2147 | Ac-PL3-Asp-Npg-B5-Asn-Thr-Ala-Ala-Phe-His-PyrS2-3Thi-BztA-Gln-NH2 | 1642 |
| I-2148 | Ac-PL3-Asp-Npg-B5-Thr-Thr-Ala-Ala-Phe-Asn-PyrS2-3Thi-BztA-Gln-NH2 | 1643 |
| I-2149 | Ac-PL3-Asp-Npg-B5-Thr-Thr-Ala-Ala-Phe-Asn-PyrS2-3Thi-BztA-Gln-NH2 | 1643 |
| I-2150 | Ac-PL3-Asp-Npg-B5-Asp-TfeGA-Ala-Ala-3CO2PhF-Leu-PyrS2-3Thi-BztA-Gln-NH2 | 1644 |
| I-2151 | Ac-PL3-Asp-Npg-B5-Asp-TfeGA-Ala-Ala-3CO2PhF-Leu-PyrS2-3Thi-BztA-Gln-NH2 | 1644 |
| I-2152 | Ac-PL3-Asp-Npg-B5-Asp-3COOHF-Ala-Ala-Phe-Leu-PyrS2-3BrF-3Thi-Gln-NH2 | 1645 |
| I-2153 | Ac-PL3-Asp-Npg-B5-Asp-3COOHF-Ala-Ala-Phe-Leu-PyrS2-3BrF-Phe-Gln-NH2 | 1646 |
| I-2154 | Ac-PL3-Asp-Npg-B5-Asp-3COOHF-Ala-Ala-Phe-Leu-PyrS2-3BrF-Cba-Gln-NH2 | 1647 |
| I-2155 | Ac-PL3-Asp-Npg-B5-Asp-3COOHF-Ala-Ala-Phe-Leu-PyrS2-3BrF-2F3MeF-Gln-NH2 | 1648 |
| I-2156 | Ac-PL3-Asp-Npg-B3-Asp-Asp-Ala-Ala-Phe-Leu-PyrS2-3Thi-BztA-Gln-NH2 | 1649 |
| I-2157 | Ac-PL3-Asp-Npg-B3-Asp-Asp-Ala-Ala-Phe-Leu-PyrS3-3Thi-BztA-Gln-NH2 | 1650 |
| I-2158 | Ac-PL3-Asp-Npg-B3-Asp-Asp-Ala-Ala-Phe-Leu-PyrS4-3Thi-BztA-Gln-NH2 | 1651 |
| I-2159 | Ac-PL3-Asp-Npg-B3-Asp-Asp-Ala-Ala-Phe-Leu-PyrS4-3Thi-BztA-Gln-NH2 | 1651 |
| I-2160 | Ac-PL3-Asp-Npg-B3-Asp-Asp-Ala-Ala-Phe-Leu-PyrS2-3Thi-BztA-Gln-NH2 | 1649 |
| I-2161 | Ac-PL3-Asp-Npg-B3-Asp-Asp-Ala-Ala-Phe-Leu-PyrS3-3Thi-BztA-Gln-NH2 | 1650 |
| I-2162 | Ac-PL3-Asp-Npg-B3-Asp-Asp-Ala-Ala-Phe-Leu-PyrS4-3Thi-BztA-Gln-NH2 | 1651 |
| I-2163 | Ac-PL3-Asn-Cha-B5-Asp-Gln-iPrLys-Ala-Phe-Leu-PyrS2-3cbmf-BztA-Gln-NH2 | 1652 |
| I-2164 | Ac-PL3-Asn-Cha-B5-Asp-Gln-iPrLys-Ala-Phe-Asn-PyrS2-3cbmf-BztA-Gln-NH2 | 1653 |
| I-2165 | Ac-PL3-Asn-Cha-B5-Asp-Gln-iPrLys-Ala-Phe-Leu-PyrS2-Phe-BztA-Hse-NH2 | 1654 |
| I-2166 | Ac-PL3-Asn-Cha-B5-Asp-Gln-iPrLys-Ala-Phe-Leu-PyrS2-3cbmf-BztA-Hse-NH2 | 1655 |
| I-2167 | Ac-PL3-Asn-Cha-B5-Asp-Gln-iPrLys-Ala-Phe-Asn-PyrS2-Phe-BztA-Hse-NH2 | 1656 |
| I-2168 | Ac-PL3-Asn-Cha-B5-Asp-Gln-iPrLys-Ala-Phe-Asn-PyrS2-2cbmf-BztA-Hse-NH2 | 1657 |
| I-2169 | Ac-PL3-Asn-Cha-B5-Asp-Gln-iPrLys-Ala-Phe-Asn-PyrS2-4cbmf-BztA-Hse-NH2 | 1658 |
| I-2170 | Ac-PL3-Asn-Cha-B5-Asp-Gln-iPrLys-Ala-Phe-Asn-PyrS2-Asn-BztA-Hse-NH2 | 1659 |
| I-2171 | Ac-PL3-Asn-Cha-B5-Asp-Gln-iPrLys-Ala-Phe-Asn-PyrS2-Gln-BztA-Hse-NH2 | 1660 |
| I-2172 | Ac-PL3-Asn-Cha-B5-Asp-Gln-iPrLys-Ala-Phe-Asn-PyrS2-Tyr-BztA-Hse-NH2 | 1661 |
| I-2173 | Ac-PL3-Asn-Cha-B5-Asp-Gln-iPrLys-Ala-2cbmf-Asn-PyrS2-Phe-BztA-Hse-NH2 | 1662 |
| I-2174 | Ac-PL3-Asn-Cha-B5-Asp-Gln-iPrLys-Ala-4cbmf-Asn-PyrS2-Phe-BztA-Hse-NH2 | 1663 |
| I-2175 | Ac-PL3-Asp-Npg-B5-Asp-Asp-Ala-Ala-Phe-Asn-PyrS2-3Thi-Trp-Gln-NH2 | 1664 |
| I-2176 | Ac-PL3-Asp-Npg-B5-Asp-Asp-Ala-Ala-Phe-Asn-PyrS2-3Thi-4C1W-Gln-NH2 | 1665 |
| I-2177 | Ac-PL3-Asp-Npg-B5-Asp-Asp-Ala-Ala-Phe-Leu-PyrS2-3Thi-4C1W-Gln-NH2 | 1666 |
| I-2178 | Ac-PL3-Asp-Npg-B5-Asp-Asp-Ala-Ala-Phe-Asn-PyrS2-3Thi-4FW-Gln-NH2 | 1667 |
| I-2179 | Ac-PL3-Asp-Npg-B5-Asp-Asp-Ala-Ala-Phe-Leu-PyrS2-3Thi-4FW-Gln-NH2 | 1668 |
| I-2180 | Ac-PL3-Asp-Npg-B5-Asp-Asp-Ala-Ala-Phe-Asn-PyrS2-3Thi-7AzaW-Gln-NH2 | 1669 |
| I-2181 | Ac-PL3-Asp-Npg-B5-Asp-Asp-Ala-Ala-Phe-Leu-PyrS2-3Thi-7AzaW-Gln-NH2 | 1670 |
| I-2182 | Ac-PL3-Asp-Npg-B5-Asp-Asp-Ala-Ala-Phe-Asn-PyrS2-3Thi-34C1F-Gln-NH2 | 1671 |
| I-2183 | Ac-PL3-Asp-Npg-B5-Asp-Asp-Ala-Ala-Phe-Leu-PyrS2-3Thi-34C1F-Gln-NH2 | 1672 |
| I-2184 | Ac-PL3-Asp-Npg-B5-Asp-TfeGA-Ala-Ala-3SO2F-Leu-PyrS2-3Thi-BztA-Gln-NH2 | 1673 |
| I-2185 | Ac-PL3-Asp-Npg-B5-Asp-TfeGA-Ala-Ala-3SO2F-Leu-PyrS2-3Thi-BztA-Gln-NH2 | 1673 |
| I-2186 | Ac-PL3-Asp-Npg-B5-Asp-TfeGA-Ala-Ala-Phe-Leu-PyrS2-3Thi-BztA-BnBoroleK-NH2 | 1674 |
| I-2187 | Ac-PL3-Asp-Npg-B5-Asp-TfeGA-Ala-Ala-Phe-Leu-PyrS2-3Thi-BztA-BnBoroleK-NH2 | 1674 |
| I-2188 | Ac-PL3-Asp-Npg-B5-Asp-3COOHF-Me2Asn-Ala-Phe-Leu-PyrS2-3Thi-BztA-Ala-NH2 | 1675 |
| I-2189 | Ac-PL3-Asp-Npg-B5-Asp-3COOHF-nLeu-Ala-Phe-Leu-PyrS2-3Thi-BztA-Val-NH2 | 1676 |
| I-2190 | Ac-PL3-Asp-Npg-B5-Asp-3COOHF-Ser-Ala-Phe-Leu-PyrS2-3Thi-BztA-Val-NH2 | 1677 |
| I-2191 | Ac-PL3-Asp-Npg-B5-Asp-3COOHF-Me2Asn-Ala-Phe-Leu-PyrS2-3Thi-BztA-Val-NH2 | 1678 |
| I-2192 | Ac-PL3-Asp-Npg-B5-Asp-3COOHF-Gln-Ala-Phe-Leu-PyrS2-3Thi-BztA-Npg-NH2 | 1679 |
| I-2193 | Ac-PL3-Asp-Npg-B5-Asp-3COOHF-nLeu-Ala-Phe-Leu-PyrS2-3Thi-BztA-Npg-NH2 | 1680 |
| I-2194 | Ac-PL3-Asp-Npg-B5-Asp-3COOHF-Aib-Ala-Phe-Leu-PyrS2-3Thi-BztA-Npg-NH2 | 1681 |
| I-2195 | Ac-PL3-Asp-Npg-B5-Asp-3COOHF-Ser-Ala-Phe-Leu-PyrS2-3Thi-BztA-Npg-NH2 | 1682 |
| I-2196 | Ac-PL3-Asp-Npg-B5-Asp-3COOHF-Me2Asn-Ala-Phe-Leu-PyrS2-3Thi-BztA-Npg- | 1683 |
| | NH2 | |
| I-2197 | Ac-PL3-Asp-Npg-B5-Asn-Thr-Ala-Ala-Phe-Asn-PyrS1-3Thi-BztA-Gln-NH2 | 1684 |
| I-2198 | Ac-PL3-Asp-Npg-B5-Asn-Thr-Ala-Ala-Phe-Asn-PyrS1-3Thi-BztA-Gln-NH2 | 1684 |
| I-2199 | Ac-PL3-Asp-Npg-B5-Asn-Thr-Ala-Ala-Phe-Asn-PyrS3-3Thi-BztA-Gln-NH2 | 1685 |
| I-2200 | Ac-PL3-Asp-Npg-B5-Asn-Thr-Ala-Ala-Phe-Asn-S7-3Thi-BztA-Gln-NH2 | 1686 |
| I-2201 | Ac-PL3-Asp-Npg-B5-Asn-Thr-Ala-Ala-Phe-Asn-Az-3Thi-BztA-Gln-NH2 | 1687 |
| I-2202 | Ac-PL3-Asp-Npg-B5-Asp-4F3COOHF-Ala-Ala-Phe-Leu-PyrS2-3Thi-BztA-Ser-NH2 | 1688 |
| I-2203 | Ac-PL3-Asp-Npg-B5-Asp-4F3COOHF-Ala-Ala-Phe-Leu-PyrS2-2C1F-BztA-Gln-NH2 | 1689 |
| I-2204 | Ac-PL3-Asp-Npg-B5-Asp-4F3COOHF-Ala-Ala-Phe-Leu-PyrS2-2C1F-BztA-Gln-NH2 | 1689 |
| I-2205 | Ac-PL3-Asp-Npg-B5-Asp-4F3COOHF-Ala-Ala-Phe-Leu-PyrS2-2C1F-BztA-Ser-NH2 | 1690 |
| I-2206 | Ac-PL3-Asp-Npg-B5-Asp-4F3COOHF-Gln-Ala-Phe-Leu-PyrS2-3Thi-BztA-Ala-NH2 | 1691 |
| I-2207 | Ac-PL3-Asp-Npg-B5-Asp-4F3COOHF-Aib-Ala-Phe-Leu-PyrS2-3Thi-BztA-Ala-NH2 | 1692 |
| I-2208 | Ac-PL3-Asp-Npg-B5-Asp-5F3Me3COOHF-Ala-Ala-Phe-Leu-PyrS2-3Thi-BztA-Gln- | 1693 |
| | NH2 | |
| I-2209 | Ac-PL3-Asp-Npg-B5-Asp-5F3Me3COOHF-Ala-Ala-Phe-Leu-PyrS2-3Thi-BztA-Ser- | 1694 |
| | NH2 | |
| I-2210 | Ac-PL3-Asp-Npg-B5-Asp-5F3Me3COOHF-Ala-Ala-Phe-Leu-PyrS2-2C1F-BztA-Ser- | 1695 |
| | NH2 | |
| I-2211 | Ac-PL3-Asp-Npg-B5-Asp-5F3Me3COOHF-Gln-Ala-Phe-Leu-PyrS2-3Thi-BztA-Ala- | 1696 |
| | NH2 | |
| I-2212 | Ac-PL3-Asp-Npg-B5-Asp-5F3Me3COOHF-Aib-Ala-Phe-Leu-PyrS2-3Thi-BztA-Ala- | 1697 |
| | NH2 | |
| I-2213 | Ac-PL3-Asp-Npg-B5-Asn-Thr-Ala-Ala-Phe-Asn-SdN-3Thi-BztA-Gln-NH2 | 1698 |
| I-2214 | Ac-PL3-Asp-Npg-B5-Asp-3COOHF-Ala-Ala-Phe-Leu-PyrS2-[Ph]-3SF-Phe-Gln-NH2 | 1699 |
| I-2215 | Ac-PL3-Asp-Npg-B5-Asp-3COOHF-Ala-Ala-Phe-Leu-PyrS2-[CyPr]-3SF-Phe-Gln- | 1700 |
| | NH2 | |
| I-2216 | Ac-PL3-Asp-Npg-B5-Asp-3COOHF-Ala-Ala-Phe-Leu-PyrS2-3Thi-34C1F-Gln-NH2 | 1701 |
| I-2217 | Ac-PL3-Asp-Npg-B5-Asp-3COOHF-Gln-Ala-Phe-Val-PyrS2-3Thi-34C1F-Ala-NH2 | 1702 |
| I-2218 | Ac-PL3-Asp-Npg-B5-Asp-3COOHF-Ala-Ala-Phe-Leu-PyrS2-2F3MeF-34C1F-Ser-NH2 | 1703 |
| I-2219 | Ac-PL3-Asp-Npg-B5-Asp-3COOHF-Gln-Ala-Phe-Leu-PyrS2-2F3MeF-34C1F-Ala-NH2 | 1704 |
| I-2220 | Ac-PL3-Asp-Npg-B5-Asp-3COOHF-Ala-Ala-Phe-Leu-PyrS2-3Thi-4C1F-Gln-NH2 | 1705 |
| I-2221 | Ac-PL3-Asp-Npg-B5-Asp-3COOHF-Gln-Ala-Phe-Val-PyrS2-3Thi-4C1F-Ala-NH2 | 1706 |
| I-2222 | Ac-PL3-Asp-Npg-B5-Asp-3COOHF-Ala-Ala-Phe-Leu-PyrS2-2F3MeF-4C1F-Ser-NH2 | 1707 |
| I-2223 | Ac-PL3-Asp-Npg-B5-Asp-3COOHF-Gln-Ala-Phe-Leu-PyrS2-2F3MeF-4C1F-Ala-NH2 | 1708 |
| I-2224 | Ac-PL3-Asp-Npg-B5-Asp-3COOHF-Ala-Ala-Phe-Leu-PyrS2-3Thi-3C1F-Gln-NH2 | 1709 |
| I-2225 | Ac-PL3-Asp-Npg-B5-Asp-3COOHF-Gln-Ala-Phe-Val-PyrS2-3Thi-3C1F-Ala-NH2 | 1710 |
| I-2226 | Ac-PL3-Asp-Npg-B5-Asp-3COOHF-Ala-Ala-Phe-Leu-PyrS2-2F3MeF-3C1F-Ser-NH2 | 1711 |
| I-2227 | Ac-PL3-Asp-Npg-B5-Asp-3COOHF-Gln-Ala-Phe-Leu-PyrS2-2F3MeF-3C1F-Ala-NH2 | 1712 |
| I-2228 | Ac-MePro-Asp-Npg-Aib-Asp-Asp-Ala-Ala-Phe-Gln-Aib-3thi-BztA-His-NH2 | 1713 |
| I-2229 | Ac-PL3-Asp-Npg-B5-Asp-Asp-Ala-Ala-Phe-Gln-PyrS2-3thi-BztA-His-Lys-NH2 | 1714 |
| I-2230 | Ac-PL3-Asp-Npg-B5-Asp-Asp-Ala-Ala-Phe-Gln-PyrS2-3thi-BztA-His-Lys-NH2 | 1714 |
| I-2231 | Ac-MePro-Asp-Npg-Aib-Asp-Asp-Ala-Ala-Phe-Gln-Aib-3thi-BztA-His-Lys-NH2 | 1715 |
| I-2232 | Ac-MePro-His-Gln-Aib-BztA-3thi-Ala-Phe-Asp-Npg-Aib-Asp-Ala-Asp-Lys-NH2 | 1716 |
| I-2233 | Ac-PL3-Asp-Npg-B5-Asp-[NdiMeButC]GA-Ala-Ala-Phe-Leu-PyrS2-3Thi-BztA-Gln- | 1717 |
| | NH2 | |
| I-2234 | Ac-PL3-Asp-Npg-B5-Asp-[Me2NPr]GA-Ala-Ala-Phe-Leu-PyrS2-3Thi-BztA-Gln-NH2 | 1718 |
| I-2235 | Ac-PL3-Asp-Npg-B5-Asp-[4AcMePip]GA-Ala-Ala-Phe-Leu-PyrS2-3Thi-BztA-Gln- | 1719 |
| | NH2 | |
| I-2236 | Ac-PL3-Asp-Npg-B5-Asp-[4CF3PhAc]GA-Ala-Ala-Phe-Leu-PyrS2-3Thi-BztA-Gln- | 1720 |
| | NH2 | |
| I-2237 | Ac-PL3-Asp-Npg-B5-Asp-[Pic]GA-Ala-Ala-Phe-Leu-PyrS2-3Thi-BztA-Gln-NH2 | 1721 |
| I-2238 | Ac-PL3-Asp-Npg-B5-Asp-[MeMorphBz]GA-Ala-Ala-Phe-Leu-PyrS2-3Thi-BztA-Gln- | 1722 |
| | NH2 | |
| I-2239 | Ac-PL3-Asp-Npg-B5-Asp-[MorphAc]GA-Ala-Ala-Phe-Leu-PyrS2-3Thi-BztA-Gln- | 1723 |
| | NH2 | |
| I-2240 | Ac-PL3-Asp-Npg-B5-Asp-[MePipAc]GA-Ala-Ala-Phe-Leu-PyrS2-3Thi-BztA-Gln-NH2 | 1724 |
| I-2241 | Ac-PL3-Asp-Npg-B5-Asp-[PfPhAc]GA-Ala-Ala-Phe-Leu-PyrS2-3Thi-BztA-Gln-NH2 | 1725 |
| I-2242 | Ac-PL3-Asp-Npg-B5-Asp-[PfBz]GA-Ala-Ala-Phe-Leu-PyrS2-3Thi-BztA-Gln-NH2 | 1726 |
| I-2243 | Ac-PL3-Asp-Npg-B5-Asp-[NdiMeButC]GAbu-Ala-Ala-Phe-Leu-PyrS2-3Thi-BztA- | 1727 |
| | Gln-NH2 | |
| I-2244 | Ac-PL3-Asp-Npg-B5-Asp-[Me2NPr]GAbu-Ala-Ala-Phe-Leu-PyrS2-3Thi-BztA-Gln- | 1728 |
| | NH2 | |
| I-2245 | Ac-PL3-Asp-Npg-B5-Asp-[4AcMePip]GAbu-Ala-Ala-Phe-Leu-PyrS2-3Thi-BztA-Gln- | 1729 |
| | NH2 | |
| I-2246 | Ac-PL3-Asp-Npg-B5-Asp-[4CF3PhAc]GAbu-Ala-Ala-Phe-Leu-PyrS2-3Thi-BztA-Gln- | 1730 |
| | NH2 | |
| I-2247 | Ac-PL3-Asp-Npg-B5-Asp-[Pic]GAbu-Ala-Ala-Phe-Leu-PyrS2-3Thi-BztA-Gln-NH2 | 1731 |
| I-2248 | Ac-PL3-Asp-Npg-B5-Asp-[MeMorphBz]GAbu-Ala-Ala-Phe-Leu-PyrS2-3Thi-BztA- | 1732 |
| | Gln-NH2 | |
| I-2249 | Ac-PL3-Asp-Npg-B5-Asp-[MorphAc]GAbu-Ala-Ala-Phe-Leu-PyrS2-3Thi-BztA-Gln- | 1733 |
| | NH2 | |
| I-2250 | Ac-PL3-Asp-Npg-B5-Asp-[MePipAc]GAbu-Ala-Ala-Phe-Leu-PyrS2-3Thi-BztA-Gln- | 1734 |
| | NH2 | |
| I-2251 | Ac-PL3-Asp-Npg-B5-Asp-[PfPhAc]GAbu-Ala-Ala-Phe-Leu-PyrS2-3Thi-BztA-Gln- | 1735 |
| | NH2 | |
| I-2252 | Ac-PL3-Asp-Npg-B5-Asp-[PfBz]GAbu-Ala-Ala-Phe-Leu-PyrS2-3Thi-BztA-Gln-NH2 | 1736 |
| I-2253 | ClAc-PL3-Asp-Npg-B5-Asp-3COOHF-Ala-Ala-Phe-Leu-PyrS2-2C1F-BztA-Ala-NH2 | 1737 |
| I-2254 | Ac-PL3-Asp-Npg-B5-Asp-3COOHF-Ala-Ala-Phe-Leu-PyrS2-[Ph]3SF-3Thi-Gln-NH2 | 1738 |
| I-2255 | Ac-PL3-Asp-Npg-B5-Asp-3COOHF-Ala-Ala-Phe-Leu-PyrS2-[Ph]3SF-Cba-Gln-NH2 | 1739 |
| I-2256 | Ac-PL3-Asp-Npg-B5-Asp-3COOHF-Ala-Ala-Phe-Leu-PyrS2-[Ph]3SF-2F3MeF-Gln- | 1740 |
| | NH2 | |
| I-2257 | Ac-PL3-Asp-Npg-B5-Asp-3COOHF-Ala-Ala-Phe-Leu-PyrS2-3Thi-BztA-Ala-NH2 | 1741 |
| I-2258 | Ac-PL3-RbOHAsp-Npg-B5-Asp-3COOHF-Ala-Ala-Phe-Leu-PyrS2-3Thi-BztA-Ala- | 1742 |
| | NH2 | |
| I-2259 | Ac-PL3-Asp-Npg-B5-Asp-3COOHF-Ala-Ala-Phe-Phe-PyrS2-3Thi-BztA-Ala-NH2 | 1743 |
| I-2260 | Ac-PL3-Asp-Npg-B5-Asp-3COOHF-Ala-Ala-3FF-Leu-PyrS2-3Thi-BztA-Ala-NH2 | 1744 |
| I-2261 | Ac-PL3-Asp-Npg-B5-Asp-3COOHF-Ala-Ala-Phe-Leu-PyrS2-3FF-BztA-Ala-NH2 | 1745 |
| I-2262 | Ac-PL3-Asp-Npg-B5-Asp-3COOHF-Ala-Ala-4FF-Leu-PyrS2-3Thi-BztA-Ala-NH2 | 1746 |
| I-2263 | Ac-PL3-Asp-Npg-B5-Asp-3COOHF-Ala-Ala-Phe-Leu-PyrS2-4FF-BztA-Ala-NH2 | 1747 |
| I-2264 | Ac-HypEs5-Asp-Npg-B5-Asp-TfeGA-Ala-Ala-Phe-Leu-PyrS2-3Thi-BztA-Gln-NH2 | 1748 |
| I-2265 | Ac-HypEs5-Asp-Npg-B5-Asp-TfeGA-Ala-Ala-Phe-Leu-PyrS2-3Thi-BztA-Gln-NH2 | 1748 |
| I-2266 | ProSAm3-Asp-Npg-B5-Asp-TfeGA-Ala-Ala-Phe-Leu-PyrS2-3Thi-BztA-Gln-NH2 | 1749 |
| I-2267 | ProSAm3-Asp-Npg-B5-Asp-TfeGA-Ala-Ala-Phe-Leu-PyrS2-3Thi-BztA-Gln-NH2 | 1749 |
| I-2268 | Ac-PL3-Asp-Npg-B5-Asp-3COOHF-Ala-Ala-Phe-Leu-PyrS2-3Thi-BztA-Asn-Ala-Ala- | 1750 |
| | Ala-Ala-Ala-NH2 | |
| I-2269 | Ac-PL3-Asp-Npg-B5-Asp-3COOHF-Ala-Ala-Phe-Leu-PyrS2-3Thi-BztA-Asn-Ala-Ala- | 1751 |
| | Ala-Ala-Ala-Ala-Ala-NH2 | |
| I-2270 | Ac-PL3-Asp-Npg-B5-Asp-3COOHF-Ala-Ala-Phe-Leu-PyrS2-3Thi-BztA-Asn-Ala-Ala- | 1752 |
| | Ala-Ala-Ala-Ala-Ala-Ala-Ala-NH2 | |
| I-2271 | Ac-PL3-Asp-Npg-B5-Asp-3COOHF-Ala-Ala-Phe-Leu-PyrS2-3Thi-BztA-Asn-Ala-Aib- | 1753 |
| | Ala-NH2 | |
| I-2272 | Ac-PL3-Asp-Npg-B5-Asp-3COOHF-Ala-Ala-Phe-Leu-PyrS2-3Thi-BztA-Asn-Ala-Aib- | 1754 |
| | Ala-Aib-Ala-NH2 | |
| I-2273 | Ac-PL3-Asp-Npg-B5-Asp-3COOHF-Ala-Ala-Phe-Leu-PyrS2-3Thi-BztA-Asn-Ala-Aib- | 1755 |
| | Ala-Aib-Ala-Aib-Ala-NH2 | |
| I-2274 | Ac-PL3-Asp-Npg-B5-Asp-3COOHF-Ala-Ala-Phe-Leu-PyrS2-3Thi-BztA-Asn-Leu-NH2 | 1756 |
| I-2275 | Ac-PL3-Asp-Npg-B5-Asp-3COOHF-Ala-Ala-Phe-Leu-PyrS2-3Thi-BztA-Asn-Leu-Leu- | 1757 |
| | Leu-NH2 | |
| I-2276 | Ac-PL3-Asp-Npg-B5-Asp-3COOHF-Ala-Ala-Phe-Leu-PyrS2-3Thi-BztA-Asn-Leu-Leu- | 1757 |
| | Leu-NH2 | |
| I-2277 | Ac-PL3-Asp-Npg-B5-Asp-3COOHF-Ala-Ala-Phe-Leu-PyrS2-3Thi-BztA-Asn-Ala-Leu- | 1758 |
| | Leu-NH2 | |
| I-2278 | Ac-PL3-Asp-Npg-B5-Asp-3COOHF-Ala-Ala-Phe-Leu-PyrS2-3Thi-BztA-Asn-Ala-Leu- | 1758 |
| | Leu-NH2 | |
| I-2279 | Ac-PL3-Asp-Npg-B5-Asp-3COOHF-Ala-Ala-Phe-Leu-PyrS2-3Thi-BztA-Asn-Leu-Leu- | 1759 |
| | Leu-Leu-Leu-NH2 | |
| I-2280 | Ac-PL3-Asp-Npg-B5-Asp-3COOHF-Ala-Ala-Phe-Leu-PyrS2-3Thi-BztA-Asn-Leu-Leu- | 1759 |
| | Leu-Leu-Leu-NH2 | |
| I-2281 | Ac-PL3-Asp-Npg-B5-Asp-3COOHF-Ala-Ala-Phe-Leu-PyrS2-3Thi-BztA-Asn-Ala-Leu- | 1760 |
| | Ala-Leu-Ala-NH2 | |
| I-2282 | Ac-PL3-Asp-Npg-B5-Asp-3COOHF-Ala-Ala-Phe-Leu-PyrS2-3Thi-BztA-Asn-Ala-Leu- | 1760 |
| | Ala-Leu-Ala-NH2 | |
| I-2283 | Ac-PL3-Asp-Npg-B5-Asp-3COOHF-Ala-Ala-Phe-Leu-PyrS2-3Thi-BztA-Asn-Ala-Leu- | 1761 |
| | Ala-Leu-Ala-Leu-Ala-NH2 | |
| I-2284 | Ac-PL3-Asp-Npg-B5-Asp-3COOHF-Ala-Ala-Phe-Leu-PyrS2-3Thi-BztA-Asn-Ala-Leu- | 1761 |
| | Ala-Leu-Ala-Leu-Ala-NH2 | |
| I-2285 | BrAc-PL3-Asp-Npg-B5-Asp-Asp-Ala-Ala-Phe-Gln-PyrS2-3Thi-BztA-His-NH2 | 1762 |
| I-2286 | BrAc-PL3-Asp-Npg-B5-Asp-3COOHF-Ala-Ala-Phe-Leu-PyrS2-2C1F-BztA-Ala-NH2 | 1763 |
| I-2287 | Ac-PL3-Asp-Npg-B5-Asp-3COOHF-Ala-Ala-Phe-Leu-PyrS2-3Thi-3Br4FF-Gln-NH2 | 1764 |
| I-2288 | Ac-PL3-Asp-Npg-B5-Asp-3COOHF-Gln-Ala-Phe-Val-PyrS2-3Thi-3Br4FF-Ala-NH2 | 1765 |
| I-2289 | Ac-PL3-Asp-Npg-B5-Asp-3COOHF-Ala-Ala-Phe-Leu-PyrS2-2F3MeF-3Br4FF-Ser- | 1766 |
| | NH2 | |
| I-2290 | Ac-PL3-Asp-Npg-B5-Asp-3COOHF-Gln-Ala-Phe-Leu-PyrS2-2F3MeF-3Br4FF-Ala- | 1767 |
| | NH2 | |
| I-2291 | Ac-PL3-Asp-Npg-B5-Asp-3COOHF-Ala-Ala-Phe-Leu-PyrS2-3Thi-34MeF-Gln-NH2 | 1768 |
| I-2292 | Ac-PL3-Asp-Npg-B5-Asp-3COOHF-Gln-Ala-Phe-Val-PyrS2-3Thi-34MeF-Ala-NH2 | 1769 |
| I-2293 | Ac-PL3-Asp-Npg-B5-Asp-3COOHF-Ala-Ala-Phe-Leu-PyrS2-2F3MeF-34MeF-Ser- | 1770 |
| | NH2 | |
| I-2294 | Ac-PL3-Asp-Npg-B5-Asp-3COOHF-Gln-Ala-Phe-Leu-PyrS2-2F3MeF-34MeF-Ala- | 1771 |
| | NH2 | |
| I-2295 | Ac-PL3-Asp-Npg-B5-Asp-3COOHF-Ala-Ala-Phe-Leu-PyrS2-3Thi-5IndA-Gln-NH2 | 1772 |
| I-2296 | Ac-PL3-Asp-Npg-B5-Asp-3COOHF-Gln-Ala-Phe-Val-PyrS2-3Thi-5IndA-Ala-NH2 | 1773 |
| I-2297 | Ac-PL3-Asp-Npg-B5-Asp-3COOHF-Ala-Ala-Phe-Leu-PyrS2-2F3MeF-5IndA-Ser-NH2 | 1774 |
| I-2298 | Ac-PL3-Asp-Npg-B5-Asp-3COOHF-Gln-Ala-Phe-Leu-PyrS2-2F3MeF-5IndA-Ala-NH2 | 1775 |
| I-2299 | Ac-PL3-Asp-Npg-B5-Asp-3COOHF-[NHEt]GlnR-Ala-Phe-Leu-PyrS2-2F3MeF-BztA- | 1776 |
| | NHEt]GlnR-NH2 | |
| I-2300 | Ac-PL3-Asp-Npg-B5-Asp-3COOHF-[NMe2]GlnR-Ala-Phe-Leu-PyrS2-2F3MeF-BztA- | 1777 |
| | INMe2]GlnR-NH2 | |
| I-2301 | Ac-PL3-Asp-Npg-B5-Asp-3COOHF-[Me2diaminobutane]GlnR-Ala-Phe-Val-PyrS2- | 1778 |
| | 3Thi-BztA-Ala-NH2 | |
| I-2302 | Ac-PL3-Asp-Npg-B5-Asp-3COOHF-[NHEt]GlnR-Ala-Phe-Val-PyrS2-3Thi-BztA-Ala- | 1779 |
| | NH2 | |
| I-2303 | Ac-PL3-Asp-Npg-B5-Asp-3COOHF-[NMe2]GlnR-Ala-Phe-Val-PyrS2-3Thi-BztA-Ala- | 1780 |
| | NH2 | |
| I-2304 | CO2Bu-PL3-Asp-Npg-B5-Asp-3COOHF-Ala-Ala-Phe-Leu-PyrS2-2C1F-BztA-Ala-NH2 | 1781 |
| I-2305 | CO2iBu-PL3-Asp-Npg-B5-Asp-3COOHF-Ala-Ala-Phe-Leu-PyrS2-2C1F-BztA-Ala- | 1782 |
| | NH2 | |
| I-2306 | BzAm3Oallyl-Asp-Npg-B5-Asp-Asp-Ala-Ala-Phe-Asn-PyrS2-3Thi-BztA-Gln-NH2 | 1783 |
| I-2307 | Ac-PL3-Asp-Npg-B5-Asp-3COOHF-Ala-Ala-Phe-Leu-PyrS2-3Thi-3BrF-Gln-NH2 | 1784 |
| I-2308 | Ac-PL3-Asp-Npg-B5-Asp-3COOHF-Gln-Ala-Phe-Val-PyrS2-3Thi-3BrF-Ala-NH2 | 1785 |
| I-2309 | Ac-PL3-Asp-Npg-B5-Asp-3COOHF-Ala-Ala-Phe-Leu-PyrS2-3Thi-2NapA-Gln-NH2 | 1786 |
| I-2310 | Ac-PL3-Asp-Npg-B5-Asp-3COOHF-Gln-Ala-Phe-Val-PyrS2-3Thi-2NapA-Ala-NH2 | 1787 |
| I-2311 | Ac-PL3-Asp-Npg-B5-Asp-3COOHF-Ala-Ala-Phe-Leu-PyrS2-3Thi-RbMe2NapA-Gln- | 1788 |
| | NH2 | |
| I-2312 | Ac-PL3-Asp-Npg-B5-Asp-3COOHF-Gln-Ala-Phe-Val-PyrS2-3Thi-RbMe2NapA-Ala- | 1789 |
| | NH2 | |
| I-2313 | Ac-PL3-Asp-Npg-B5-Asp-3COOHF-Ala-Ala-Phe-Leu-PyrS2-3Thi-SbMe2NapA-Gln- | 1790 |
| | NH2 | |
| I-2314 | Ac-PL3-Asp-Npg-B5-Asp-3COOHF-Gln-Ala-Phe-Val-PyrS2-3Thi-SbMe2NapA-Ala- | 1791 |
| | NH2 | |
| I-2315 | Ac-PL3-Asp-Npg-B5-Asp-3COOHF-[Morph]GlnR-Ala-Phe-Leu-PyrS2-2F3MeF-BztA- | 1792 |
| | Ala-NH2 | |
| I-2316 | Ac-PL3-Asp-Npg-B5-Asp-3COOHF-[TfePpz]GlnR-Ala-Phe-Leu-PyrS2-2F3MeF-BztA- | 1793 |
| | Ala-NH2 | |
| I-2317 | Ac-PL3-Asp-Npg-B5-Asp-3COOHF-[4Pippip]GlnR-Ala-Phe-Leu-PyrS2-2F3MeF- | 1794 |
| | BztA-Ala-NH2 | |
| I-2318 | Ac-PL3-Asp-Npg-B5-Asp-3COOHF-[2OxoPpz]GlnR-Ala-Phe-Leu-PyrS2-2F3MeF- | 1795 |
| | BztA-Ala-NH2 | |
| I-2319 | Ac-PL3-Asp-Npg-B5-Asp-3COOHF-[AcPpz]GlnR-Ala-Phe-Leu-PyrS2-2F3MeF-BztA- | 1796 |
| | Ala-NH2 | |
| I-2320 | Ac-PL3-Asp-Npg-B5-Asp-3COOHF-[isoindoline]GlnR-Ala-Phe-Leu-PyrS2-2F3MeF- | 1797 |
| | BztA-Ala-NH2 | |
| I-2321 | Ac-PL3-Asp-Npg-B5-Asp-3COOHF-[EtSO2Ppz]GlnR-Ala-Phe-Leu-PyrS2-2F3MeF- | 1798 |
| | BztA-Ala-NH2 | |
| I-2322 | Ac-PL3-Asp-Npg-B5-Asp-3COOHF-[bismethoxyethylamine]GlnR-Ala-Phe-Leu-PyrS2- | 1799 |
| | 2F3MeF-BztA-Ala-NH2 | |
| I-2323 | Ac-PL3-Asp-Npg-B5-Asp-3COOHF-[Me2NPrPip]GlnR-Ala-Phe-Leu-PyrS2-2F3MeF- | 1800 |
| | BztA-Ala-NH2 | |
| I-2324 | CO2Me-PL3-Asp-Npg-B5-Asp-3COOHF-Ala-Ala-Phe-Leu-PyrS2-2C1F-BztA-Ala- | 1801 |
| | NH2 | |
| I-2325 | CO2Hex-PL3-Asp-Npg-B5-Asp-3COOHF-Ala-Ala-Phe-Leu-PyrS2-2C1F-BztA-Ala- | 1802 |
| | NH2 | |
| I-2326 | CO2Ph-PL3-Asp-Npg-B5-Asp-Asp-Ala-Ala-Phe-Gln-PyrS2-3Thi-BztA-His-NH2 | 1803 |
| I-2327 | CO2Ph-PL3-Asp-Npg-B5-Asp-3COOHF-Ala-Ala-Phe-Leu-PyrS2-2C1F-BztA-Ala-NH2 | 1804 |
| I-2328 | Ac-HypBzEs3OAllyl-Asp-Npg-B5-Asp-TfeGA-Ala-Ala-Phe-Leu-PyrS2-3Thi-BztA- | 1805 |
| | Gln-NH2 | |
| I-2329 | Ac-PL3-[CH2CMe2CO2H]TriAzDap-Npg-B5-Asp-Asp-Ala-Ala-Phe-Asn-PyrS2-3Thi- | 1806 |
| | BztA-Gln-NH2 | |
| I-2330 | Ac-PL3-[CMe2CO2H]TriAzDap-Npg-B5-Asp-Asp-Ala-Ala-Phe-Asn-PyrS2-3Thi- | 1807 |
| | BztA-Gln-NH2 | |
| I-2331 | Ac-PL3-Glu-Npg-B5-Asn-Thr-Ala-Ala-Phe-Asn-PyrS2-3Thi-BztA-Gln-NH2 | 1808 |
| I-2332 | Ac-PL3-Glu-Npg-B5-Asn-Thr-Ala-Ala-Phe-Asn-PyrS2-3Thi-BztA-Gln-NH2 | 1808 |
| I-2333 | Ac-PL3-Asn-Npg-B5-Asn-Thr-Ala-Ala-Phe-Asn-PyrS2-3Thi-BztA-Gln-NH2 | 1809 |
| I-2334 | Ac-PL3-Asp-Npg-B5-Asn-Thr-Ala-Ala-Phe-Thr-PyrS2-3Thi-BztA-Ala-NH2 | 1810 |
| I-2335 | Ac-PL3-Asp-Npg-B5-Asn-3COOHF-Ala-Ala-Phe-Asn-PyrS2-3Thi-BztA-Gln-NH2 | 1811 |
| I-2336 | Ac-PL3-Asp-Npg-B5-Asn-3COOHF-Ala-Ala-Phe-Thr-PyrS2-3Thi-BztA-Gln-NH2 | 1812 |
| I-2337 | Ac-PL3-Asp-Npg-B5-Asn-Thr-Ala-Ala-Phe-Thr-PyrS2-3Thi-BztA-His-NH2 | 1813 |
| I-2338 | Ac-PL3-Asp-Npg-B5-Asn-Thr-Aib-Ala-Phe-Asn-PyrS2-3Thi-BztA-Gln-NH2 | 1814 |
| I-2339 | Ac-PL3-Asp-Npg-B5-Asn-Thr-Ala-Aib-Phe-Asn-PyrS2-3Thi-BztA-Gln-NH2 | 1815 |
| I-2340 | Ac-PL3-Asn-Cha-B5-Asp-3COOHF-iPrLys-Ala-Phe-Leu-PyrS2-Phe-BztA-Gln-NH2 | 1816 |
| I-2341 | Ac-PL3-Asn-Cha-B5-Asp-TfeGA-iPrLys-Ala-Phe-Leu-PyrS2-Phe-BztA-Gln-NH2 | 1817 |
| I-2342 | Ac-PL3-Asn-Cha-B5-Asp-3cbmf-iPrLys-Ala-Phe-Leu-PyrS2-Phe-BztA-Gln-NH2 | 1818 |
| I-2343 | Ac-PL3-Asn-Cha-B5-Asp-3cbmf-iPrLys-Ala-Phe-Leu-PyrS2-Phe-BztA-Gln-NH2 | 1818 |
| I-2344 | Ac-PL3-Asn-Cha-B5-Asp-Hse-iPrLys-Ala-Phe-Leu-PyrS2-Phe-BztA-Gln-NH2 | 1819 |
| I-2345 | Ac-PL3-Asn-Cha-B5-Asp-Hse-iPrLys-Ala-Phe-Leu-PyrS2-Phe-BztA-Gln-NH2 | 1819 |
| I-2346 | Ac-PL3-Asn-Cha-B5-Asp-Lys-iPrLys-Ala-Phe-Leu-PyrS2-Phe-BztA-Gln-NH2 | 1820 |
| I-2347 | Ac-PL3-Asn-Cha-B5-Asp-Lys-iPrLys-Ala-Phe-Leu-PyrS2-Phe-BztA-Gln-NH2 | 1820 |
| I-2348 | Ac-PL3-Asn-Cha-B5-Asp-His-iPrLys-Ala-Phe-Leu-PyrS2-Phe-BztA-Gln-NH2 | 1821 |
| I-2349 | Ac-PL3-Asn-Cha-B5-Asp-His-iPrLys-Ala-Phe-Leu-PyrS2-Phe-BztA-Gln-NH2 | 1821 |
| I-2350 | Ac-PL3-Asn-Cha-B5-Asp-Gln-iPrLys-Ala-Phe-Leu-PyrS2-Phe-BztA-Lys-NH2 | 1822 |
| I-2351 | Ac-PL3-Asn-Cha-B5-Asp-Gln-iPrLys-Ala-Phe-Leu-PyrS2-Phe-BztA-His-NH2 | 1823 |
| I-2352 | Ac-PL3-Asn-Cha-B5-Asp-Gln-iPrLys-Ala-Phe-Leu-PyrS2-Phe-BztA-Ala-NH2 | 1824 |
| I-2353 | Ac-PL3-Hse-Cha-B5-Asp-Gln-iPrLys-Ala-Phe-Leu-PyrS2-Phe-BztA-Gln-NH2 | 1825 |
| I-2354 | Ac-PL3-Asn-Cha-B5-Asp-Gln-Hse-Ala-Phe-Leu-PyrS2-Phe-BztA-Gln-NH2 | 1826 |
| I-2355 | Ac-PL3-Asn-Cha-B5-Asp-Gln-Hse-Ala-Phe-Leu-PyrS2-Phe-BztA-Gln-NH2 | 1826 |
| I-2356 | Ac-PL3-[Et]AspE-Npg-B5-Asp-Asp-Ala-Ala-Phe-Leu-PyrS2-3Thi-BztA-Gln-NH2 | 1827 |
| I-2357 | Ac-PL3-Asp-Npg-B5-[Et]AspE-Asp-Ala-Ala-Phe-Leu-PyrS2-3Thi-BztA-Gln-NH2 | 1828 |
| I-2358 | Ac-PL3-Asp-Npg-B5-Asp-[Et]AspE-Ala-Ala-Phe-Leu-PyrS2-3Thi-BztA-Gln-NH2 | 1829 |
| I-2359 | Ac-PL3-[Me]AspE-Npg-B5-Asp-Asp-Ala-Ala-Phe-Leu-PyrS2-3Thi-BztA-Gln-NH2 | 1830 |
| I-2360 | Ac-PL3-Asp-Npg-B5-[Me]AspE-Asp-Ala-Ala-Phe-Leu-PyrS2-3Thi-BztA-Gln-NH2 | 1831 |
| I-2361 | Ac-PL3-Asp-Npg-B5-Asp-[Me]AspE-Ala-Ala-Phe-Leu-PyrS2-3Thi-BztA-Gln-NH2 | 1832 |
| I-2362 | CO2Me-PL3-Asp-Npg-B5-Asp-Asp-Ala-Ala-Phe-Gln-PyrS2-3Thi-BztA-His-NH2 | 1833 |
| I-2363 | CO2Bu-PL3-Asp-Npg-B5-Asp-Asp-Ala-Ala-Phe-Gln-PyrS2-3Thi-BztA-His-NH2 | 1834 |
| I-2364 | CO2iBu-PL3-Asp-Npg-B5-Asp-Asp-Ala-Ala-Phe-Gln-PyrS2-3Thi-BztA-His-NH2 | 1835 |
| I-2365 | Ac-PL3-Asp-Npg-B5-Asp-[Et]GluE-Ala-Ala-Phe-Leu-PyrS2-3Thi-BztA-Gln-NH2 | 1836 |
| I-2366 | Ac-PL3-Asp-Npg-B5-Asp-[Me]GluE-Ala-Ala-Phe-Leu-PyrS2-3Thi-BztA-Gln-NH2 | 1837 |
| I-2367 | Ac-PL3-Asp-Npg-B5-Asp-[CH2CH2CO2H]TriAzDap-Gln-Ala-Phe-Leu-PyrS2- | 1838 |
| | 2F3MeF-BztA-Ala-NH2 | |
| I-2368 | Ac-PL3-Asp-Npg-B5-Asp-[CH2CMe2CO2H]TriAzDap-Gln-Ala-Phe-Leu-PyrS2- | 1839 |
| | 2F3MeF-BztA-Ala-NH2 | |
| I-2369 | Ac-PL3-Asp-Npg-B5-Asp-[CMe2CO2H]TriAzDap-Gln-Ala-Phe-Leu-PyrS2-2F3MeF- | 1840 |
| | BztA-Ala-NH2 | |
| I-2370 | Ac-PL3-Asp-Npg-B5-Asp-[CH2CH2CO2H]TriAzDap-Ala-Ala-Phe-Leu-PyrS2- | 1841 |
| | 2F3MeF-BztA-Ser-NH2 | |
| I-2371 | Ac-PL3-Asp-Npg-B5-Asp-[CH2CH2CO2H]TriAzDap-Ala-Ala-Phe-Leu-PyrS2- | 1841 |
| | 2F3MeF-BztA-Ser-NH2 | |
| I-2372 | Ac-PL3-Asp-Npg-B5-Asp-[CH2CMe2CO2H]TriAzDap-Ala-Ala-Phe-Leu-PyrS2- | 1842 |
| | 2F3MeF-BztA-Ser-NH2 | |
| I-2373 | Ac-PL3-Asp-Npg-B5-Asp-[CH2CO2H]TriAzDap-Ala-Ala-Phe-Leu-PyrS2-2F3MeF- | 1843 |
| | BztA-Ser-NH2 | |
| I-2374 | Ac-PL3-Asp-Npg-B5-Asp-[CMe2CO2H]TriAzDap-Ala-Ala-Phe-Leu-PyrS2-2F3MeF- | 1844 |
| | BztA-Ser-NH2 | |
| I-2375 | Ac-PL3-Asp-Npg-B5-Asp-Asp-Ala-Ala-Phe-Leu-PyrS2-3Thi-BztA-[3C]TriAzLys-NH2 | 1845 |
| I-2376 | BzAm3OAllyl-Asp-Npg-B5-Asp-TfeGA-Ala-Ala-Phe-Leu-PyrS2-3Thi-BztA-Gln-NH2 | 1846 |
| I-2377 | ProBzAm3OAllyl-Asp-Npg-B5-Asp-TfeGA-Ala-Ala-Phe-Leu-PyrS2-3Thi-BztA-Gln- | 1847 |
| | NH2 | |
| I-2378 | Ac-PL3-Asp-Npg-B5-Asp-3COOHF-Ala-Ala-Phe-Leu-PyrS2-2F3MeF-BztA-Gln-Leu- | 1848 |
| | Ala-NH2 | |
| I-2379 | Ac-PL3-Asp-Npg-B5-Asp-3COOHF-Ala-Ala-Phe-Leu-PyrS2-2F3MeF-BztA-Gln-Leu- | 1849 |
| | Val-NH2 | |
| I-2380 | Ac-PL3-Asp-Npg-B5-Asp-3COOHF-Ala-Ala-Phe-Leu-PyrS2-2F3MeF-BztA-Gln-Leu- | 1850 |
| | Leu-NH2 | |
| I-2381 | Ac-PL3-Asp-Npg-B5-Asp-3COOHF-Ala-Ala-Phe-Leu-PyrS2-2F3MeF-BztA-Gln-Leu- | 1851 |
| | Phe-NH2 | |
| I-2382 | Ac-PL3-Asp-Npg-B5-Asp-3COOHF-Ala-Ala-Phe-Leu-PyrS2-2F3MeF-BztA-Gln-Leu- | 1852 |
| | Gln-NH2 | |
| I-2383 | Ac-PL3-Asp-Npg-B5-Asp-3COOHF-Ala-Ala-Phe-Leu-PyrS2-2F3MeF-BztA-Gln-Leu- | 1853 |
| | Thr-NH2 | |
| I-2384 | Ac-PL3-Asp-Npg-B5-Asp-3COOHF-Ala-Ala-Phe-Leu-PyrS2-2F3MeF-BztA-Gln-Leu- | 1854 |
| | Ser-NH2 | |
| I-2385 | Ac-PL3-Asp-Npg-B5-Asp-3COOHF-Ala-Ala-Phe-Leu-PyrS2-2F3MeF-BztA-Gln-Leu- | 1855 |
| | Ile-NH2 | |
| I-2386 | Ac-PL3-Asp-Npg-B5-Asp-3COOHF-Ala-Ala-Phe-Leu-PyrS2-2F3MeF-BztA-Gln-Leu- | 1856 |
| | Aib-NH2 | |
| I-2387 | Ac-PL3-Asp-Npg-B5-Asp-3COOHF-Ala-Ala-Phe-Leu-PyrS2-2F3MeF-BztA-Gln-Leu- | 1857 |
| | CyLeu-NH2 | |
| I-2388 | Ac-PL3-Asp-Npg-B5-Asp-3COOHF-Ala-Ala-Phe-Leu-PyrS2-2F3MeF-BztA-Gln-Leu- | 1858 |
| | Cbg-NH2 | |
| I-2389 | Ac-PL3-Asp-Npg-B5-Asp-3COOHF-Ala-Ala-Phe-Leu-PyrS2-2F3MeF-BztA-Gln-Leu- | 1859 |
| | Cpg-NH2 | |
| I-2390 | Ac-PL3-Asp-Npg-B5-Asp-3COOHF-Ala-Ala-Phe-Leu-PyrS2-2F3MeF-BztA-Gln-Leu- | 1860 |
| | Asn-NH2 | |
| I-2391 | Ac-PL3-Asp-Npg-B5-Asp-3COOHF-Ala-Ala-Phe-Leu-PyrS2-2F3MeF-BztA-Gln-Leu- | 1861 |
| | nLeu-NH2 | |
| I-2392 | Ac-PL3-Asp-Npg-B5-Asp-3COOHF-Ala-Ala-Phe-Leu-PyrS2-2F3MeF-BztA-Gln-Leu- | 1862 |
| | Tyr-NH2 | |
| I-2393 | Ac-PL3-Asp-Npg-B5-Asp-3COOHF-Ala-Ala-Phe-Leu-PyrS2-2F3MeF-BztA-Gln-Leu- | 1863 |
| | Arg-NH2 | |
| I-2394 | Ac-PL3-Asp-Npg-B5-Asp-3COOHF-Ala-Ala-Phe-Leu-PyrS2-2F3MeF-BztA-Gln-Leu- | 1864 |
| | Trp-NH2 | |
| I-2395 | Ac-PL3-Asp-Npg-B5-Asp-3COOHF-Ala-Ala-Phe-Leu-PyrS2-2F3MeF-BztA-Gln-Leu- | 1865 |
| | dAla-NH2 | |
| I-2396 | Ac-PL3-Asp-Npg-B5-Asp-3COOHF-Ala-Ala-Phe-Leu-PyrS2-2F3MeF-BztA-Gln-Leu- | 1866 |
| | dLeu-NH2 | |
| I-2397 | Ac-PL3-Asp-Npg-B5-Asp-3COOHF-Ala-Ala-Phe-Leu-PyrS2-2F3MeF-BztA-Gln-Leu- | 1867 |
| | dThr-NH2 | |
| I-2398 | Ac-PL3-Asp-Npg-B5-Asp-3COOHF-Ala-Ala-Phe-Leu-PyrS2-2F3MeF-BztA-Gln-Leu- | 1868 |
| | dGln-NH2 | |
| I-2399 | Ac-PL3-Asp-Npg-B5-Asp-3COOHF-Ala-Ala-Phe-Leu-PyrS2-2F3MeF-BztA-Gln-Ala- | 1869 |
| | Ala-NH2 | |
| I-2400 | Ac-PL3-Asp-Npg-B5-Asp-3COOHF-Ala-Ala-Phe-Leu-PyrS2-2F3MeF-BztA-Gln-Phe- | 1870 |
| | Ala-NH2 | |
| I-2401 | Ac-PL3-Asp-Npg-B5-Asp-3COOHF-Ala-Ala-Phe-Leu-PyrS2-2F3MeF-BztA-Gln-Val- | 1871 |
| | Ala-NH2 | |
| I-2402 | PropynOH-PL3-Asp-Npg-B5-Asp-Asp-Ala-Ala-Phe-Gln-PyrS2-3Thi-BztA-His-NH2 | 1872 |
| I-2403 | PropynOH-PL3-Asp-Npg-B5-Asp-3COOHF-Ala-Ala-Phe-Leu-PyrS2-2C1F-BztA-Ala- | 1873 |
| | NH2 | |
| I-2404 | PAc3OAllyl-Asp-Npg-B5-Asp-TfeGA-Ala-Ala-Phe-Leu-PyrS2-3Thi-BztA-Gln-NH2 | 1874 |
| I-2405 | ProPAc3OAllyl-Asp-Npg-B5-Asp-TfeGA-Ala-Ala-Phe-Leu-PyrS2-3Thi-BztA-Gln- | 1875 |
| | NH2 | |
| I-2406 | Ac-HypPAc3OAllyl-Asp-Npg-B5-Asp-TfeGA-Ala-Ala-Phe-Leu-PyrS2-3Thi-BztA-Gln- | 1876 |
| | NH2 | |
| I-2407 | Ac-PL3-Asp-Npg-B5-Asn-Thr-Aib-Ala-Phe-Arg-PyrS2-3Thi-BztA-Gln-NH2 | 1877 |
| I-2408 | Ac-PL3-Asp-Npg-B5-Asn-Thr-Aib-Ala-Phe-Leu-PyrS2-3Thi-BztA-Gln-NH2 | 1878 |
| I-2409 | Ac-PL3-Asp-Npg-B5-Asn-Thr-Aib-Ala-Phe-Thr-PyrS2-3Thi-BztA-Gln-NH2 | 1879 |
| I-2410 | Ac-PL3-Asp-Npg-B5-Asn-Thr-Aib-Ala-Phe-His-PyrS2-3Thi-BztA-Gln-NH2 | 1880 |
| I-2411 | Ac-PL3-Asp-Npg-B5-Asn-Thr-Aib-Ala-Phe-Asn-PyrS2-3Thi-BztA-Ala-NH2 | 1881 |
| I-2412 | Ac-PL3-Asp-Npg-B5-Asn-Thr-Aib-Ala-Phe-Asn-PyrS2-3Thi-BztA-Phe-NH2 | 1882 |
| I-2413 | Ac-PL3-Asp-Npg-B5-Asn-Thr-Aib-Ala-Phe-Asn-PyrS2-3Thi-BztA-Arg-NH2 | 1883 |
| I-2414 | Ac-PL3-Asp-Npg-B5-Asn-Thr-Aib-Ala-Phe-Asn-PyrS2-3Thi-BztA-His-NH2 | 1884 |
| I-2415 | Ac-PL3-Asp-Npg-B5-Asn-Thr-Aib-Ala-Phe-Asn-PyrS2-3Thi-BztA-Asn-NH2 | 1885 |
| I-2416 | Ac-PL3-Asp-Npg-B5-Asn-Thr-Aib-Ala-Phe-Asn-PyrS2-3Thi-BztA-Thr-NH2 | 1886 |
| I-2417 | Ac-PL3-Asp-Npg-B5-Asn-Thr-Aib-Ala-Phe-Asn-PyrS2-3Thi-34C1F-Gln-NH2 | 1887 |
| I-2418 | Ac-PL3-Asn-Cha-B5-Asp-Gln-Ala-Ala-Phe-Leu-PyrS2-Phe-BztA-Lys-NH2 | 1888 |
| I-2419 | Ac-PL3-Asn-Cha-B5-Asp-Gln-Hse-Ala-Phe-Leu-PyrS2-Phe-BztA-Lys-NH2 | 1889 |
| I-2420 | Ac-PL3-Asn-Cha-B5-Asp-Gln-Asn-Ala-Phe-Leu-PyrS2-Phe-BztA-Lys-NH2 | 1890 |
| I-2421 | Ac-PL3-Asn-Cha-B5-Asp-Gln-Gln-Ala-Phe-Leu-PyrS2-Phe-BztA-Lys-NH2 | 1891 |
| I-2422 | Ac-PL3-Asn-Cha-B5-Asp-Gln-Ser-Ala-Phe-Leu-PyrS2-Phe-BztA-Lys-NH2 | 1892 |
| I-2423 | Ac-PL3-Asn-Cha-B5-Asp-Gln-Thr-Ala-Phe-Leu-PyrS2-Phe-BztA-Lys-NH2 | 1893 |
| I-2424 | Ac-PL3-Asn-Cha-B5-Asp-Gln-Aib-Ala-Phe-Leu-PyrS2-Phe-BztA-Lys-NH2 | 1894 |
| I-2425 | Ac-PL3-Asn-Cha-B5-Asp-Gln-MorphAsn-Ala-Phe-Leu-PyrS2-Phe-BztA-Lys-NH2 | 1895 |
| I-2426 | Ac-PL3-Asn-Cha-B5-Asp-Gln-iPrLys-Ala-Phe-Leu-PyrS2-Phe-BztA-MorphAsn-NH2 | 1896 |
| I-2427 | Ac-PL3-Asn-Cha-B5-Asp-Gln-MorphNva-Ala-Phe-Leu-PyrS2-Phe-BztA-Lys-NH2 | 1897 |
| I-2428 | Ac-PL3-Asn-Cha-B5-Asp-Gln-iPrLys-Ala-Phe-Leu-PyrS2-Phe-BztA-MorphNva-NH2 | 1898 |
| I-2429 | Ac-PL3-Asp-Cha-B5-Asp-Gln-iPrLys-Ala-Phe-Leu-PyrS2-Phe-BztA-Lys-NH2 | 1899 |
| I-2430 | Ac-PL3-Asp-Npg-B5-Asp-5iPr3COOHF-Ala-Ala-Phe-Leu-PyrS2-2F3MeF-BztA-Gln- | 1900 |
| | NH2 | |
| I-2431 | Ac-PL3-Asp-Npg-B5-Asp-5iPr3COOHF-Gln-Ala-Phe-Leu-PyrS2-2F3MeF-BztA-Ala- | 1901 |
| | NH2 | |
| I-2432 | Ac-PL3-Asp-Npg-B5-Asp-3COOHF-Ala-Ala-Phe-Leu-PyrS2-2F3MeF-BztA-Ser- | 1902 |
| | [3C]TriAzLys-NH2 | |
| I-2433 | Ac-PL3-Hse-Npg-B5-Hse-Glu-Ala-Ala-4BrF-Leu-PyrS2-Phe-BztA-Asn-NH2 | 1903 |
| I-2434 | Ac-PL3-Asn-Npg-B5-Asn-Glu-Gln-Ala-Phe-Leu-PyrS2-Phe-BztA-Gln-NH2 | 1904 |
| I-2435 | Ac-PL3-Asn-Npg-B5-Asn-Glu-Gln-Ala-Phe-Leu-S8-Phe-BztA-Gln-NH2 | 1905 |
| I-2436 | Ac-PL3-Hse-Npg-B5-Asn-Glu-Ala-Ala-Phe-Leu-PyrS2-Phe-BztA-Asn-NH2 | 1906 |
| I-2437 | Ac-PL3-Asn-Npg-B5-Asn-Glu-Ser-Ala-Phe-Leu-PyrS2-Phe-BztA-Gln-NH2 | 1907 |
| I-2438 | Ac-PL3-Hse-Npg-B5-Asp-His-Ala-Ala-Phe-Thr-PyrS2-Phe-BztA-Gln-NH2 | 1908 |
| I-2439 | Ac-PL3-Hse-Npg-B5-Asp-Gln-Ala-Ala-Phe-His-PyrS2-Phe-BztA-Gln-NH2 | 1909 |
| I-2440 | Ac-PL3-Asn-Npg-B5-Asp-Gln-Ala-Ala-Phe-His-PyrS2-Phe-BztA-Gln-NH2 | 1910 |
| I-2441 | Ac-PL3-Hse-Npg-B5-Asp-Arg-Ala-Ala-Phe-Thr-PyrS2-Phe-BztA-Gln-NH2 | 1911 |
| I-2442 | Ac-PL3-Asn-Npg-B5-Asp-His-Ala-Ala-Phe-Leu-PyrS2-Phe-BztA-Gln-NH2 | 1912 |
| I-2443 | Ac-PL3-Hse-Npg-B5-Asp-Gln-Ala-Ala-Phe-Leu-PyrS2-Phe-BztA-Gln-NH2 | 1913 |
| I-2444 | Ac-PL3-Asp-Npg-B5-Asp-3COOHF-Ala-Ala-Phe-Leu-PyrS2-2F3MeF-BztA-Ser- | 1914 |
| | [3C]TriAzdLys-NH2 | |
| I-2445 | Ac-PL3-Asp-Npg-B5-Asp-[CCpCO2H]TriAzDap-Ala-Ala-Phe-Leu-PyrS2-3Thi-BztA- | 1915 |
| | Gln-NH2 | |
| I-2446 | Ac-PL3-Asn-Cha-B5-Asp-Gln-iPrLys-Ala-Phe-Leu-PyrS2-3Thi-BztA-Gln-NH2 | 1916 |
| I-2447 | Ac-PL3-Asn-Cha-B5-Asp-Thr-Hse-Ala-Phe-Leu-PyrS2-Phe-BztA-Gln-NH2 | 1917 |
| I-2448 | Ac-PL3-Asn-Cha-B5-Asp-Thr-iPrLys-Ala-Phe-Leu-PyrS2-Phe-BztA-Gln-NH2 | 1918 |
| I-2449 | Ac-PL3-Asn-Cha-B5-Asp-Thr-Hse-Ala-Phe-Leu-PyrS2-Phe-BztA-Lys-NH2 | 1919 |
| I-2450 | Ac-PL3-Asn-Cha-B5-Asp-Thr-iPrLys-Ala-Phe-Leu-PyrS2-Phe-BztA-Lys-NH2 | 1920 |
| I-2451 | Ac-PL3-Asn-Cha-B5-Asp-Gln-Hse-Ala-Phe-Leu-PyrS2-3Thi-BztA-Gln-NH2 | 1921 |
| I-2452 | Ac-PL3-Asn-Cha-B5-Asp-Gln-iPrLys-Ala-Phe-Leu-PyrS2-3Thi-BztA-Gln-NH2 | 1916 |
| I-2453 | Ac-PL3-Asn-Cha-B5-Asp-Thr-iPrLys-Ala-Phe-Leu-PyrS2-Phe-BztA-Gln-NH2 | 1918 |
| I-2454 | Ac-PL3-Asn-Cha-B5-Asp-Thr-Hse-Ala-Phe-Leu-PyrS2-Phe-BztA-Lys-NH2 | 1919 |
| I-2455 | Ac-PL3-Asn-Cha-B5-Asp-Thr-iPrLys-Ala-Phe-Leu-PyrS2-Phe-BztA-Lys-NH2 | 1920 |
| I-2456 | Ac-PL3-Asp-Npg-B5-Asp-3COOHF-Ala-Ala-Phe-Leu-PyrS2-2F3MeF-SbMeBztA-Gln- | 1922 |
| | NH2 | |
| I-2457 | Ac-PL3-Asp-Npg-B5-Asp-3COOHF-Gln-Ala-Phe-Leu-PyrS2-2F3MeF-SbMeBztA-Ala- | 1923 |
| | NH2 | |
| I-2458 | Ac-PL3-Asp-Npg-B5-Asp-3COOHF-Ala-Ala-Phe-Leu-PyrS2-2F3MeF-RbMeBztA- | 1924 |
| | Gln-NH2 | |
| I-2459 | Ac-PL3-Asp-Npg-B5-Asp-3COOHF-Gln-Ala-Phe-Leu-PyrS2-2F3MeF-RbMeBztA- | 1925 |
| | Ala-NH2 | |
| I-2460 | Ac-PL3-Asp-Npg-B5-Asp-3COOHF-Ala-Ala-Phe-Leu-PyrS2-2F3MeF-2NapA-Gln- | 1926 |
| | NH2 | |
| I-2461 | Ac-PL3-Asp-Npg-B5-Asp-3COOHF-Gln-Ala-Phe-Leu-PyrS2-2F3MeF-2NapA-Ala- | 1927 |
| | NH2 | |
| I-2462 | Ac-PL3-Asp-Npg-B5-Asp-3COOHF-Ala-Ala-Phe-Leu-PyrS2-2F3MeF-RbMe2NapA- | 1928 |
| | Gln-NH2 | |
| I-2463 | Ac-PL3-Asp-Npg-B5-Asp-3COOHF-Gln-Ala-Phe-Leu-PyrS2-2F3MeF-RbMe2NapA- | 1929 |
| | Ala-NH2 | |
| I-2464 | Ac-PL3-Asp-Npg-B5-Asp-3COOHF-Ala-Ala-Phe-Leu-PyrS2-2F3MeF-SbMe2NapA- | 1930 |
| | Gln-NH2 | |
| I-2465 | Ac-PL3-Asp-Npg-B5-Asp-3COOHF-Gln-Ala-Phe-Leu-PyrS2-2F3MeF-SbMe2NapA- | 1931 |
| | Ala-NH2 | |
| I-2466 | Ac-PL3-Asp-Npg-B5-Asp-3COOHF-Ala-Ala-Phe-Leu-PyrS2-2F3MeF-BztA-Me2Gln- | 1932 |
| | Ala-NH2 | |
| I-2467 | Ac-PL3-Asp-Npg-B5-Asp-TfeGA-Ala-Ala-Phe-Leu-PyrS2-3Thi-BztA-Me2Gln-Ala- | 1933 |
| | NH2 | |
| I-2468 | Ac-PL3-Asp-Npg-B5-Asp-3COOHF-Aib-Ala-Phe-Abu-PyrS2-2F3MeF-BztA-Me2Gln- | 1934 |
| | Ala-NH2 | |
| I-2469 | Ac-PL3-Asp-Npg-B5-Asp-3COOHF-Aib-Ala-Phe-Abu-PyrS2-3Thi-BztA-Me2Gln-Ala- | 1935 |
| | NH2 | |
| I-2470 | Ac-PL3-Asp-Npg-B5-Asp-3COOHF-Ala-Ala-Phe-Leu-PyrS2-2F3MeF-BztA- | 1936 |
| | NHEt]GlnR-Ala-NH2 | |
| I-2471 | Ac-PL3-Asp-Npg-B5-Asp-TfeGA-Ala-Ala-Phe-Leu-PyrS2-3Thi-BztA-[NHEt]GlnR- | 1937 |
| | Ala-NH2 | |
| I-2472 | Ac-PL3-Asp-Npg-B5-Asp-3COOHF-Ala-Ala-Phe-Abu-PyrS2-2F3MeF-BztA- | 1938 |
| | INHEt]GlnR-Ala-NH2 | |
| I-2473 | Ac-PL3-Asp-Npg-B5-Asp-3COOHF-Aib-Ala-Phe-Abu-PyrS2-3Thi-BztA-[NHEt]GlnR- | 1939 |
| | Ala-NH2 | |
| I-2474 | Ac-PL3-Asp-Npg-B5-Asp-TfeGA-Ala-Ala-Phe-Leu-PyrS2-3Thi-BztA-[Pip]GlnR-Ala- | 1940 |
| | NH2 | |
| I-2475 | Ac-PL3-Asp-Npg-B5-Asp-3COOHF-Ala-Ala-Phe-Abu-PyrS2-2F3MeF-BztA- | 1941 |
| | [Pip ]GlnR-Ala-NH2 | |
| I-2476 | Ac-PL3-Asp-Npg-B5-Asp-3COOHF-Aib-Ala-Phe-Abu-PyrS2-3Thi-BztA-[Pip]GlnR- | 1942 |
| | Ala-NH2 | |
| I-2477 | Ac-PL3-Asp-Npg-B5-Asn-Thr-Aib-Ala-Phe-Asn-PyrS2-3Thi-BztA-Lys-NH2 | 1943 |
| I-2478 | Ac-PL3-Asp-Npg-B5-Asn-Thr-Aib-Ala-Phe-Asn-PyrS2-3Thi-BztA-Tyr-NH2 | 1944 |
| I-2479 | Ac-PL3-Asp-Npg-B5-Asn-Thr-Aib-Ala-Phe-Asn-PyrS2-3Thi-BztA-Leu-NH2 | 1945 |
| I-2480 | Ac-PL3-Asp-Npg-B5-Asn-Thr-Aib-Ala-Phe-Asn-PyrS2-3Thi-BztA-Val-NH2 | 1946 |
| I-2481 | Ac-PL3-Asp-Npg-B5-Asn-Thr-Aib-Ala-Phe-Asn-PyrS2-3Thi-BztA-Trp-NH2 | 1947 |
| I-2482 | Ac-PL3-Asp-Npg-B5-Asp-[CH2CCpCO2H]TriAzDap-Ala-Ala-Phe-Leu-PyrS2-3Thi- | 1948 |
| | BztA-Gln-NH2 | |
| I-2483 | Ac-PL3-Asp-Npg-B5-Asp-[CH2CChCO2H]TriAzDap-Ala-Ala-Phe-Leu-PyrS2-3Thi- | 1949 |
| | BztA-Gln-NH2 | |
| I-2484 | Ac-PL3-Asp-Npg-B5-Asp-3COOHF-Ala-Ala-Phe-Leu-PyrS2-2F3MeF-2F3MeW-Gln- | 1950 |
| | NH2 | |
| I-2485 | Ac-PL3-Asp-Npg-B5-Asp-3COOHF-Gln-Ala-Phe-Leu-PyrS2-2F3MeF-2F3MeW-Ala- | 1951 |
| | NH2 | |
| I-2486 | Ac-PL3-Asp-Npg-B5-Asp-3COOHF-Ala-Ala-Phe-Leu-PyrS2-2F3MeF-7C1BztA-Gln- | 1952 |
| | NH2 | |
| I-2487 | Ac-PL3-Asp-Npg-B5-Asp-3COOHF-Gln-Ala-Phe-Leu-PyrS2-2F3MeF-7C1BztA-Ala- | 1953 |
| | NH2 | |
| I-2488 | Ac-PL3-Asp-Npg-B5-Asp-3COOHF-Ala-Ala-Phe-Leu-PyrS2-2F3MeF-7FBztA-Gln- | 1954 |
| | NH2 | |
| I-2489 | Ac-PL3-Asp-Npg-B5-Asp-3COOHF-Gln-Ala-Phe-Leu-PyrS2-2F3MeF-7FBztA-Ala- | 1955 |
| | NH2 | |
| I-2490 | Ac-PL3-Asp-Npg-B5-Asp-3COOHF-Ala-Ala-Phe-Leu-PyrS2-2F3MeF-4C1BztA-Gln- | 1956 |
| | NH2 | |
| I-2491 | Ac-PL3-Asp-Npg-B5-Asp-3COOHF-Gln-Ala-Phe-Leu-PyrS2-2F3MeF-4C1BztA-Ala- | 1957 |
| | NH2 | |
| I-2492 | Ac-PL3-Asp-Npg-B5-Asn-Thr-Cpg-Ala-Phe-Asn-PyrS2-3Thi-BztA-Gln-NH2 | 1958 |
| I-2493 | Ac-PL3-Asp-Npg-B5-Asn-Thr-CyLeu-Ala-Phe-Asn-PyrS2-3Thi-BztA-Gln-NH2 | 1959 |
| I-2494 | Ac-PL3-Asp-Npg-B5-Asn-Thr-Aib-Ala-Phe-Asn-PyrS2-3Thi-BztA-Me2Asn-NH2 | 1960 |
| I-2495 | Ac-PL3-Asp-Npg-B5-Asn-Thr-Aib-Ala-Phe-Asn-PyrS2-3Thi-BztA-MeAsn-NH2 | 1961 |
| I-2496 | Ac-PL3-Asp-Npg-B5-Asn-Thr-Aib-Ala-Phe-Me2Asn-PyrS2-3Thi-BztA-Asn-NH2 | 1962 |
| I-2497 | Ac-PL3-Asp-Npg-B5-Asn-Thr-Aib-Ala-Phe-MeAsn-PyrS2-3Thi-BztA-Asn-NH2 | 1963 |
| I-2498 | Ac-PL3-Asn-Cha-B5-Asp-Gln-Hse-Ala-Phe-Leu-PyrS2-Phe-BztA-MorphAsn-NH2 | 1964 |
| I-2499 | Ac-PL3-Asn-Cha-B5-Asp-Gln-nLeu-Ala-Phe-Leu-PyrS2-Phe-BztA-MorphAsn-NH2 | 1965 |
| I-2500 | Ac-PL3-Asn-Cha-B5-Asp-Gln-hhLeu-Ala-Phe-Leu-PyrS2-Phe-BztA-MorphAsn-NH2 | 1966 |
| I-2501 | Ac-PL3-Asn-Cha-B5-Asp-Gln-Me2Gln-Ala-Phe-Leu-PyrS2-Phe-BztA-MorphAsn-NH2 | 1967 |
| I-2502 | Ac-PL3-Asn-Cha-B5-Asp-Gln-MeGln-Ala-Phe-Leu-PyrS2-Phe-BztA-MorphAsn-NH2 | 1968 |
| I-2503 | Ac-PL3-Asn-Cha-B5-Asp-Gln-Thr-Ala-Phe-Leu-PyrS2-Phe-BztA-MorphAsn-NH2 | 1969 |
| I-2504 | Ac-PL3-Asn-Cha-B5-Asp-Gln-Gln-Ala-Phe-Leu-PyrS2-Phe-BztA-MorphAsn-NH2 | 1970 |
| I-2505 | Ac-PL3-Asp-Npg-B6-Asp-3COOHF-Ala-Ala-Phe-Leu-PyrS-2F3MeF-BztA-Gln-NH2 | 1971 |
| I-2506 | Ac-PL3-Asp-Npg-B6-Asp-3COOHF-Gln-Ala-Phe-Leu-PyrS-2F3MeF-BztA-Ala-NH2 | 1972 |
| I-2507 | Ac-PL3-Asp-Npg-B6-Asp-3COOHF-Gln-Ala-Phe-Leu-PyrS-2F3MeF-BztA-Ala-NH2 | 1972 |
| I-2508 | Ac-PL3-Asp-Npg-B6-Asp-3COOHF-Ala-Ala-Phe-Leu-PyrS1-2F3MeF-BztA-Gln-NH2 | 1973 |
| I-2509 | Ac-PL3-Asp-Npg-B6-Asp-3COOHF-Ala-Ala-Phe-Leu-PyrS1-2F3MeF-BztA-Gln-NH2 | 1973 |
| I-2510 | Ac-PL3-Asp-Npg-B6-Asp-3COOHF-Gln-Ala-Phe-Leu-PyrS1-2F3MeF-BztA-Ala-NH2 | 1974 |
| I-2511 | Ac-PL3-Asp-Npg-B6-Asp-3COOHF-Ala-Ala-Phe-Leu-PyrS2-2F3MeF-BztA-Gln-NH2 | 1975 |
| I-2512 | Ac-PL3-Asp-Npg-B6-Asp-3COOHF-Ala-Ala-Phe-Leu-PyrS2-2F3MeF-BztA-Gln-NH2 | 1975 |
| I-2513 | Ac-PL3-Asp-Npg-B6-Asp-3COOHF-Ala-Ala-Phe-Leu-PyrS2-2F3MeF-BztA-Gln-NH2 | 1975 |
| I-2514 | Ac-PL3-Asp-Npg-B6-Asp-3COOHF-Ala-Ala-Phe-Leu-PyrS2-2F3MeF-BztA-Gln-NH2 | 1975 |
| I-2515 | Ac-PL3-Asp-Npg-B6-Asp-3COOHF-Gln-Ala-Phe-Leu-PyrS2-2F3MeF-BztA-Ala-NH2 | 1976 |
| I-2516 | Ac-PL3-Asp-Npg-B6-Asp-3COOHF-Gln-Ala-Phe-Leu-PyrS2-2F3MeF-BztA-Ala-NH2 | 1976 |
| I-2517 | Ac-PL3-Asp-Npg-B6-Asp-3COOHF-Gln-Ala-Phe-Leu-PyrS2-2F3MeF-BztA-Ala-NH2 | 1976 |
| I-2518 | Ac-PL3-Asp-Npg-B6-Asp-3COOHF-Ala-Ala-Phe-Leu-PyrS-2F3MeF-BztA-Gln-NH2 | 1971 |
| I-2519 | Ac-PL3-Asp-Npg-B6-Asp-3COOHF-Gln-Ala-Phe-Leu-PyrS1-2F3MeF-BztA-Ala-NH2 | 1974 |
| I-2520 | Ac-PL3-Asp-Npg-B5-Asp-[CH2CChCO2H]TriAzDap-Gln-Ala-Phe-Leu-PyrS2- | 1977 |
| | 2F3MeF-BztA-Ala-NH2 | |
| I-2521 | Ac-PL3-Asp-Npg-B5-Asp-[CH2CChCO2H]TriAzDap-Ala-Ala-Phe-Leu-PyrS2- | 1978 |
| | 2F3MeF-BztA-Ser-NH2 | |
| I-2522 | Ac-PL3-Asn-Cha-B5-Asp-Gln-[Ac]Lys-Ala-Phe-Leu-PyrS2-Phe-BztA-MorphAsn-NH2 | 1979 |
| I-2523 | Ac-PL3-Asn-Cha-B5-Asp-Gln-[Phc]Lys-Ala-Phe-Leu-PyrS2-Phe-BztA-MorphAsn- | 1980 |
| | NH2 | |
| I-2524 | Ac-PL3-Asn-Cha-B5-Asp-Gln-[MeSO2]Lys-Ala-Phe-Leu-PyrS2-Phe-BztA-MorphAsn- | 1981 |
| | NH2 | |
| I-2525 | Ac-PL3-Asn-Cha-B5-Asp-Gln-[CF3CO]Lys-Ala-Phe-Leu-PyrS2-Phe-BztA-MorphAsn- | 1982 |
| | NH2 | |
| I-2526 | Ac-PL3-Asn-Cha-B5-Asp-Gln-[mPEG4]Lys-Ala-Phe-Leu-PyrS2-Phe-BztA-MorphAsn- | 1983 |
| | NH2 | |
| I-2527 | Ac-PL3-Asn-Cha-B5-Asp-Gln-[MorphAc]Lys-Ala-Phe-Leu-PyrS2-Phe-BztA- | 1984 |
| | MorphAsn-NH2 | |
| I-2528 | Ac-PL3-Asn-Cha-B5-Asp-Gln-[Me2Npr]Lys-Ala-Phe-Leu-PyrS2-Phe-BztA- | 1985 |
| | MorphAsn-NH2 | |
| I-2529 | 5hexenyl-PL3-Asp-AllylGly-B5-Asp-3COOHF-Ala-Ala-Phe-Leu-PyrS2-2F3MeF- | 1986 |
| | BztA-Gln-NH2 | |
| I-2530 | 4pentenyl-PL3-Asp-AllylGly-B5-Asp-3COOHF-Ala-Ala-Phe-Leu-PyrS2-2F3MeF- | 1987 |
| | BztA-Gln-NH2 | |
| I-2531 | Ac-PL3-Asp-nLeu-B5-Asp-3COOHF-Ala-Ala-Phe-Leu-PyrS2-2F3MeF-BztA-Gln-NH2 | 1988 |
| I-2532 | Ac-PL3-Asp-Npg-B5-Asp-3COOHF-Ala-Ala-Phe-Leu-PyrS2-2F3MeF-BztA-Me2Gln- | 1989 |
| | NH2 | |
| I-2533 | Ac-PL3-Asp-Npg-B5-Asp-3COOHF-Ala-Ala-Phe-nLeu-PyrS2-2F3MeF-BztA-Me2Gln- | 1990 |
| | NH2 | |
| I-2534 | Ac-PL3-Asp-Npg-B5-Asp-3COOHF-Ala-Ala-Phe-Phe-PyrS2-2F3MeF-BztA-Me2Gln- | 1991 |
| | NH2 | |
| I-2535 | Ac-PL3-Asp-Npg-B5-Asp-3COOHF-Ala-Ala-Phe-Me2Gln-PyrS2-2F3MeF-BztA- | 1992 |
| | Me2Gln-NH2 | |
| I-2536 | Ac-PL3-Asp-Npg-B5-Asp-3COOHF-Ala-Ala-Phe-Me2Gln-PyrS2-2F3MeF-BztA- | 1992 |
| | Me2Gln-NH2 | |
| I-2537 | Ac-PL3-Asp-Npg-B5-Asp-3COOHF-Ala-Ala-Phe-MorphGln-PyrS2-2F3MeF-BztA- | 1993 |
| | Me2Gln-NH2 | |
| I-2538 | Ac-PL3-Asp-Npg-B5-Asp-3COOHF-Ala-Ala-Phe-MorphGln-PyrS2-2F3MeF-BztA- | 1993 |
| | Me2Gln-NH2 | |
| I-2539 | Ac-PL3-Asp-Npg-B5-Asp-3COOHF-Ala-Ala-Phe-AcLys-PyrS2-2F3MeF-BztA- | 1994 |
| | Me2Gln-NH2 | |
| I-2540 | Ac-PL3-Asp-Npg-B5-Asp-3COOHF-Ala-Ala-Phe-AcLys-PyrS2-2F3MeF-BztA- | 1994 |
| | Me2Gln-NH2 | |
| I-2541 | Ac-PL3-Asp-Npg-B5-Asp-3COOHF-Ala-Ala-Phe-Leu-PyrS2-2F3MeF-BztA- | 1995 |
| | MorphGln-NH2 | |
| I-2542 | Ac-PL3-Asp-Npg-B5-Asp-3COOHF-Ala-Ala-Phe-nLeu-PyrS2-2F3MeF-BztA- | 1996 |
| | MorphGln-NH2 | |
| I-2543 | Ac-PL3-Asp-Npg-B5-Asp-3COOHF-Ala-Ala-Phe-Phe-PyrS2-2F3MeF-BztA- | 1997 |
| | MorphGln-NH2 | |
| I-2544 | Ac-PL3-Asp-Npg-B5-Asp-3COOHF-Ala-Ala-Phe-Me2Gln-PyrS2-2F3MeF-BztA- | 1998 |
| | MorphGln-NH2 | |
| I-2545 | Ac-PL3-Asp-Npg-B5-Asp-3COOHF-Ala-Ala-Phe-Me2Gln-PyrS2-2F3MeF-BztA- | 1998 |
| | MorphGln-NH2 | |
| I-2546 | Ac-PL3-Asp-Npg-B5-Asp-3COOHF-Ala-Ala-Phe-MorphGln-PyrS2-2F3MeF-BztA- | 1999 |
| | MorphGln-NH2 | |
| I-2547 | Ac-PL3-Asp-Npg-B5-Asp-3COOHF-Ala-Ala-Phe-MorphGln-PyrS2-2F3MeF-BztA- | 1999 |
| | MorphGln-NH2 | |
| I-2548 | Ac-PL3-Asp-Npg-B5-Asp-3COOHF-Ala-Ala-Phe-AcLys-PyrS2-2F3MeF-BztA- | 2000 |
| | MorphGln-NH2 | |
| I-2549 | Ac-PL3-Asp-Npg-B5-Asp-3COOHF-Ala-Ala-Phe-AcLys-PyrS2-2F3MeF-BztA- | 2000 |
| | MorphGln-NH2 | |
| I-2550 | Bn3OAllyl-AcAsp-Npg-B5-Asp-TfeGA-Ala-Ala-Phe-Leu-PyrS2-3Thi-BztA-Gln-NH2 | 2001 |
| I-2551 | Ac-PL3-Asp-Npg-B5-Asp-3COOHF-Aib-Ala-Phe-nLeu-PyrS2-3Thi-BztA- | 2002 |
| | [NMe2]GlnR-NH2 | |
| I-2552 | Ac-PL3-Asp-Npg-B5-Asp-3COOHF-Aib-Ala-Phe-nLeu-PyrS2-3Thi-BztA- | 2003 |
| | NHEt]GlnR-NH2 | |
| I-2553 | Ac-PL3-Asp-Npg-B5-Asp-3COOHF-Aib-Ala-Phe-nLeu-PyrS2-3Thi-BztA- | 2004 |
| | [Morph]GlnR-NH2 | |
| I-2554 | Ac-PL3-Asp-Npg-B5-Asp-3COOHF-Aib-Ala-Phe-nLeu-PyrS2-3Thi-BztA- | 2005 |
| | [bismethoxyethylamine]GlnR-NH2 | |
| I-2555 | Ac-PL3-Asp-Npg-B5-Asp-3COOHF-Aib-Ala-Phe-nLeu-PyrS2-3Thi-BztA- | 2006 |
| | [4Pippip]GlnR-NH2 | |
| I-2556 | Ac-PL3-Asp-Npg-B5-Asp-3COOHF-Aib-Ala-Phe-nLeu-PyrS2-3Thi-BztA- | 2007 |
| | [AcPpz]GlnR-NH2 | |
| I-2557 | Ac-PL3-Asp-Npg-B5-Asp-3COOHF-Aib-Ala-Phe-nLeu-PyrS2-3Thi-BztA- | 2008 |
| | 4F3CPip]GlnR-NH2 | |
| I-2558 | Ac-PL3-Asp-Npg-B5-Asp-3COOHF-Aib-Ala-Phe-Abu-PyrS2-3Thi-BztA- | 2009 |
| | [Morph]GlnR-NH2 | |
| I-2559 | Ac-PL3-Asp-Npg-B5-Asp-3COOHF-Aib-Ala-Phe-Abu-PyrS2-3Thi-BztA- | 2010 |
| | [bismethoxyethylamine]GlnR-NH2 | |
| I-2560 | Ac-PL3-Asp-Npg-B5-Asp-3COOHF-Aib-Ala-Phe-Abu-PyrS2-3Thi-BztA- | 2011 |
| | [4Pippip]GlnR-NH2 | |
| I-2561 | Ac-PL3-Asp-Npg-B5-Asp-3COOHF-Aib-Ala-Phe-Abu-PyrS2-3Thi-BztA- | 2012 |
| | [AcPpz]GlnR-NH2 | |
| I-2562 | Ac-PL3-Tyr-TfeGA-B5-Ala-Asp-Asp-Ala-Ala-4BrF-S8-Ala-Phe-BztA-Gln-NH2 | 2013 |
| I-2563 | Ac-R3-Asp-Npg-B5-Asp-3COOHF-Ala-Ala-Phe-Leu-PyrS2-2F3MeF-BztA-Gln-NH2 | 2014 |
| I-2564 | Ac-R5-Asp-Npg-B5-Asp-3COOHF-Ala-Ala-Phe-Leu-PyrS2-2F3MeF-BztA-Gln-NH2 | 2015 |
| I-2565 | Ac-R5-Asp-Npg-B5-Asp-3COOHF-Ala-Ala-Phe-Leu-PyrS2-2F3MeF-BztA-Gln-NH2 | 2015 |
| I-2566 | Ac-Pro-R3-Asp-Npg-B5-Asp-3COOHF-Ala-Ala-Phe-Leu-PyrS2-2F3MeF-BztA-Gln- | 2016 |
| | NH2 | |
| I-2567 | Ac-Pro-R5-Asp-Npg-B5-Asp-3COOHF-Ala-Ala-Phe-Leu-PyrS2-2F3MeF-BztA-Gln- | 2017 |
| | NH2 | |
| I-2568 | Ac-PyrR-Ala-Asp-Npg-B5-Asp-3COOHF-Ala-Ala-Phe-Leu-PyrS2-2F3MeF-BztA-Gln- | 2018 |
| | NH2 | |
| I-2569 | Ac-PyrR-Glu-Asp-Npg-B5-Asp-3COOHF-Ala-Ala-Phe-Leu-PyrS2-2F3MeF-BztA-Gln- | 2019 |
| | NH2 | |
| I-2570 | Ac-R3-Asp-Npg-B5-Asp-3COOHF-Ala-Ala-Phe-Leu-PyrS2-2F3MeF-BztA-Gln-NH2 | 2014 |
| I-2571 | Ac-R5-Asp-Npg-B5-Asp-3COOHF-Ala-Ala-Phe-Leu-PyrS2-2F3MeF-BztA-Gln-NH2 | 2015 |
| I-2572 | Ac-Pro-R3-Asp-Npg-B5-Asp-3COOHF-Ala-Ala-Phe-Leu-PyrS2-2F3MeF-BztA-Gln- | 2016 |
| | NH2 | |
| I-2573 | Ac-Pro-R5-Asp-Npg-B5-Asp-3COOHF-Ala-Ala-Phe-Leu-PyrS2-2F3MeF-BztA-Gln- | 2017 |
| | NH2 | |
| I-2574 | Ac-R5-Ala-Asp-Npg-B5-Asp-3COOHF-Ala-Ala-Phe-Leu-PyrS2-2F3MeF-BztA-Gln- | 2020 |
| | NH2 | |
| I-2575 | Ac-Pro-R5-Glu-Asp-Npg-B5-Asp-3COOHF-Ala-Ala-Phe-Leu-PyrS2-2F3MeF-BztA- | 2021 |
| | Gln-NH2 | |
| I-2576 | Ac-PL3-Asp-Npg-B5-Asp-3COOHF-Aib-Ala-Phe-dSer-PyrS2-3Thi-BztA-dSer-Ala- | 2022 |
| | NH2 | |
| I-2577 | Ac-PL3-Asp-Npg-B5-Asp-3COOHF-Aib-Ala-Phe-Ser-PyrS2-3Thi-BztA-Ser-Ala-NH2 | 2023 |
| I-2578 | Ac-PL3-Asp-Npg-B5-Asp-3COOHF-Aib-Ala-Phe-AcLys-PyrS2-3Thi-BztA-Ala-Ala- | 2024 |
| | NH2 | |
| I-2579 | Ac-PL3-Asp-Npg-B5-Asp-3COOHF-Aib-Ala-Phe-AcLys-PyrS2-2F3MeF-BztA-Ala- | 2025 |
| | Ala-NH2 | |
| I-2580 | Ac-PL3-Asp-Npg-B5-Asp-3COOHF-Ala-Ala-Phe-Leu-SPip1-2F3MeF-BztA-Gln-NH2 | 2026 |
| I-2581 | Ac-PL3-Asp-Npg-B5-Asp-3COOHF-Ala-Ala-Phe-Leu-SPip2-2F3MeF-BztA-Gln-NH2 | 2027 |
| I-2582 | Ac-PL3-Asp-Npg-B5-Asp-3COOHF-Ala-Ala-Phe-Leu-SPip2-2F3MeF-BztA-Gln-NH2 | 2027 |
| I-2583 | Ac-PL3-Asp-Npg-B5-Asp-3COOHF-Ala-Ala-Phe-Leu-SPip3-2F3MeF-BztA-Gln-NH2 | 2028 |
| I-2584 | Ac-PL3-Asp-Npg-B5-Asp-3COOHF-Gln-Ala-Phe-Leu-SPip1-2F3MeF-BztA-Ala-NH2 | 2029 |
| I-2585 | Ac-PL3-Asp-Npg-B5-Asp-3COOHF-Gln-Ala-Phe-Leu-SPip2-2F3MeF-BztA-Ala-NH2 | 2030 |
| I-2586 | Ac-PL3-Asp-Npg-B5-Asp-3COOHF-Gln-Ala-Phe-Leu-SPip2-2F3MeF-BztA-Ala-NH2 | 2030 |
| I-2587 | Ac-PL3-Asp-Npg-B5-Asp-3COOHF-Gln-Ala-Phe-Leu-SPip3-2F3MeF-BztA-Ala-NH2 | 2031 |
| I-2588 | Ac-PL3-Asp-Npg-B5-Asp-3COOHF-Ala-Ala-Phe-Leu-SPip2-3Thi-BztA-Gln-NH2 | 2032 |
| I-2589 | Ac-PL3-Asp-Npg-B5-Asp-3COOHF-Ala-Ala-Phe-Leu-SPip2-3Thi-BztA-Gln-NH2 | 2032 |
| I-2590 | Ac-PL3-Asp-Npg-B5-Asp-3COOHF-Ala-Ala-Phe-Leu-SPip3-3Thi-BztA-Gln-NH2 | 2033 |
| I-2591 | Ac-PL3-Asp-Npg-B5-Asp-3COOHF-Gln-Ala-Phe-Leu-SPip1-3Thi-BztA-Ala-NH2 | 2034 |
| I-2592 | Ac-PL3-Asp-Npg-B5-Asp-3COOHF-Gln-Ala-Phe-Leu-SPip2-3Thi-BztA-Ala-NH2 | 2035 |
| I-2593 | Ac-PL3-Asp-Npg-B5-Asp-3COOHF-Gln-Ala-Phe-Leu-SPip2-3Thi-BztA-Ala-NH2 | 2035 |
| I-2594 | Ac-PL3-Asp-Npg-B5-Asp-TfeGA-Ala-Ala-Phe-Leu-PyrS2-3Thi-BztA-Gln-NH2 | 571 |
| I-2595 | Ac-PL3-Asp-Npg-B5-Asp-TfeGA-Ala-Ala-Phe-Leu-PyrS2-3Thi-BztA-Gln-NH2 | 571 |
| I-2596 | Ac-PL3-Asp-Npg-B5-Asp-3COOHF-Ala-Ala-Phe-Leu-PyrS2-2F3MeF-BztA-Gln-NH2 | 1116 |
| I-2597 | Ac-PL3-Asp-Npg-B5-Asp-3COOHF-Ala-Ala-Phe-Leu-PyrS2-2F3MeF-BztA-Gln-NH2 | 1116 |
| I-2598 | 5hexenyl-MePro-Asp-B5-Ala-Asp-Asp-Ala-Ala-Phe-PyrS2-Leu-3Thi-BztA-Gln-NH2 | 2036 |
| I-2599 | 4pentenyl-MePro-Asp-B5-Ala-Asp-Asp-Ala-Ala-Phe-PyrS2-Leu-3Thi-BztA-Gln-NH2 | 2037 |
| I-2600 | 5hexenyl-MePro-Asp-B5-Ala-Asp-Asp-Ala-Ala-Phe-PyrS2-Leu-3Thi-BztA-Gln-NH2 | 2036 |
| I-2601 | 4pentenyl-MePro-Asp-B5-Ala-Asp-Asp-Ala-Ala-Phe-PyrS2-Leu-3Thi-BztA-Gln-NH2 | 2037 |
| I-2602 | 5hexenyl-MePro-Asp-B5-Ala-Asp-3COOHF-Ala-Ala-Phe-PyrS2-Leu-3Thi-BztA-Gln- | 2038 |
| | NH2 | |
| I-2603 | 4pentenyl-MePro-Asp-B5-Ala-Asp-3COOHF-Ala-Ala-Phe-PyrS2-Leu-3Thi-BztA-Gln- | 2039 |
| | NH2 | |
| I-2604 | 5hexenyl-MePro-Asp-B5-Ala-Asp-3COOHF-Ala-Ala-Phe-PyrS2-Leu-3Thi-BztA-Gln- | 2038 |
| | NH2 | |
| I-2605 | 4pentenyl-MePro-Asp-B5-Ala-Asp-3COOHF-Ala-Ala-Phe-PyrS2-Leu-3Thi-BztA-Gln- | 2039 |
| | NH2 | |
| I-2606 | BzAm2Allyl-MePro-Asp-B5-Ala-Asp-Asp-Ala-Ala-Phe-PyrS2-Leu-3Thi-BztA-Gln- | 2040 |
| | NH2 | |
| I-2607 | BzAm2Allyl-MePro-Asp-B5-Ala-Asp-3COOHF-Ala-Ala-Phe-PyrS2-Leu-3Thi-BztA- | 2041 |
| | Gln-NH2 | |
| I-2608 | 3butenyl-MePro-Asp-B5-Ala-Asp-Asp-Ala-Ala-Phe-PyrS2-Leu-3Thi-BztA-Gln-NH2 | 2042 |
| I-2609 | 5hexenyl-MePro-Asp-B5-Ala-Asp-Asp-Ala-Ala-Phe-PyrS2-Leu-3Thi-BztA-Gln-NH2 | 2036 |
| I-2610 | Ac-PL3-Asp-Npg-B5-Asp-3COOHF-Ala-Ala-Phe-Leu-Az2-2F3MeF-BztA-Gln-NH2 | 2043 |
| I-2611 | Ac-PL3-Asp-Npg-B5-Asp-3COOHF-Ala-Ala-Phe-Leu-Az3-2F3MeF-BztA-Gln-NH2 | 2044 |
| I-2612 | Ac-PL3-Asp-Npg-B5-Asp-3COOHF-Ala-Ala-Phe-Leu-Az3-3Thi-BztA-Gln-NH2 | 2045 |
| I-2613 | Ac-PL3-Asp-Npg-B5-Asp-3COOHF-Aib-Ala-Phe-Leu-Az2-2F3MeF-BztA-Gln-NH2 | 2046 |
| I-2614 | Ac-PL3-Asp-Npg-B5-Asp-3COOHF-Aib-Ala-Phe-Leu-Az2-2F3MeF-BztA-Gln-NH2 | 2046 |
| I-2615 | Ac-PL3-Asp-Npg-B5-Asp-3COOHF-Aib-Ala-Phe-Leu-Az3-2F3MeF-BztA-Gln-NH2 | 2047 |
| I-2616 | Ac-PL3-Asp-Npg-B5-Asp-3COOHF-Aib-Ala-Phe-Leu-Az3-2F3MeF-BztA-Gln-NH2 | 2047 |
| I-2617 | Ac-PL3-Asp-Npg-B5-Asp-3COOHF-Aib-Ala-Phe-Leu-Az2-3Thi-BztA-Gln-NH2 | 2048 |
| I-2618 | Ac-PL3-Asp-Npg-B5-Asp-3COOHF-Aib-Ala-Phe-Leu-Az3-3Thi-BztA-Gln-NH2 | 2049 |
| I-2619 | Ac-PL3-Asp-Npg-B5-Asp-3COOHF-Aib-Ala-Phe-Leu-Az3-3Thi-BztA-Gln-NH2 | 2049 |

### Example 6. Synthesis of Compound 2-2

[chemical structure]

[2630] Step 1: 1-Allyl 3-benzyl (S)-3-(((benzyloxy)carbonyl)amino)pyrrolidine-1,3-dicarboxylate (2). A mixture of (S)-3-((((9H-fluoren-9-yl)methoxy)carbonyl)amino)-1-((allyloxy) carbonyl)pyrrolidine-3-carboxylic acid (20 g, 45.9 mmol) in DCM (300 mL) and Et₂N (300 mL) was stirred at room temperature for 3 h. The mixture was concentrated and dissolved into THF (400 mL) and water (400 mL). Cbz-OSU (17.1 g, 68.9 mmol) and NaHCO₃ (7.71 g, 91.7 mmol) was add. The reaction mixture was stirred at room temperature for 16 h. The mixture was adjusted pH to 3-4 with 1N HCl. The aqueous phase was extracted with EtOAc (3×800 mL). The desired EtOAc layer was then dried, concentrated to afford the crude product and dissolved into DMF (500 mL). BnBr (15.69 g, 91.7 mmol) and Na₂CO₃ (9.72 g, 91.7 mmol) was added and stirred at room temperature for 16 h. The reaction mixture was diluted with ethyl acetate (2 L), washed with brine (5×500 mL), dried over Na₂SO₄, concentrated and purified by silica gel column chromatography (eluted with hexane/ethyl acetate=2:1, V/V) to afford the product (18.7 g, 93% yield) as a brown oil. MS (ESI): m z=439.1 [M+H]⁺.

[2631] Step 2: Benzyl (S)-3-(((benzyloxy)carbonyl)amino)pyrrolidine-3-carboxylate (3). A mixture of 1-allyl 3-benzyl (S)-3-(((benzyloxy)carbonyl)amino)pyrrolidine -1,3-dicarboxylate (9.35 g, 21.3 mmol), Pd(PPh₃)₄ (4.93 g, 4.3 mmol) and Barbituric acid (5.46 g, 42.7 mmol) in DCM (300 mL) under Ar was stirred at room temperature for 3 h. The mixture was concentrated and purified by silica gel column chromatography (eluted with DCM/MeOH=10:1, V/V) to afford the product (7.5 g, 98% yield) as a brown oil. MS (ESI): m/z=355.1 [M+H]⁺.

[2632] Step 3: Benzyl (S)-3-(((benzyloxy)carbonyl)amino)-1-(2-(tert-butoxy)-2-oxoethyl) pyrrolidine-3-carboxylate (4). A mixture of benzyl (S)-3-(((benzyloxy)carbonyl)amino)pyrrolidine-3-carboxylate (15 g, 42.4 mmol) and tert-butyl 2-bromoacetate (16.5 g, 84.7 mmol) in DCM (400 mL) was stirred at room temperature for 16 h. Et₂NH (12.4 g, 169.5 mmol) was added and stirred at room temperature for 3 h. The mixture was adjusted PH to 8-9 with sat. NaHCO₃. The aqueous phase was extracted with DCM (3×500 mL). The desired DCM layers was then dried, concentrated purified by silica gel column chromatography (eluted with hexane/ethyl acetate=2:1, V/V) to afford the product (10.9 g, 55% yield) as a yellow oil. MS (ESI): m z=469.2 [M+H]⁺.

[2633] Step 4: (S)-3-((((9H-fluoren-9-yl)methoxy)carbonyl)amino)-1-(2-(tert-butoxy)-2-oxoethyl)pyrrolidine-3-carboxylic acid (compound-2-2). A mixture of benzyl (S)-3-(((benzyloxy)carbonyl)amino)-1-(2-(tert-butoxy)-2-oxoethyl)pyrrolidine-3-carboxylate (14.5 g, 31 mmol) and Palladium on carbon (6 g, 10%) in MeOH (600 mL) and AcOH (20 mL) was attached to a hydrogenation apparatus. The system was evacuated and then refilled with hydrogen. The mixture was stirred at room temperature for 6 h. The reaction mixture was filtered out and the filtrate was concentrated and dissolved into dioxane (300 mL) and water (300 mL). FmocOSu (20.88 g, 62 mmol) and NaHCO₃ (13 g, 155 mmol) was added. The mixture was stirred at room temperature for 48 h. The mixture was adjusted PH to 3-4 with 0.5 N HCl. The aqueous phase was extracted with DCM (3×500 mL). The desired DCM layers was then dried and concentrated. The resulting solid was recrystallized from methanol: EtOAc: PE=1:1:1 to give the product (10.62 g, 74% yield) as a white solid. MS (ESI): m/z=467.0 [M+H]⁺. 400 MHz, DMSO-d6, δ 7.90-7.89 (m, 3H); 7.73 (d, J=7.6 Hz, 2H); 7.42 (t, J=7.2 Hz, 2H); 7.34 (t, J=7.4 Hz, 2H); 4.30-4.20 (m, 3H); 3.27-3.18 (m, 2H); 3.13 (d, J=10 Hz, 1H); 2.93 (d, J=10 Hz, 1H); 2.84-2.79 (m, 1H); 2.66-2.60 (m, 1H); 2.24-2.17 (m, 1H); 2.06-2.00 (m, 1H); 1.41 (s, 9H). Purity by HPLC: 99.78% (214 nm), RT=16.29 min; Mobile Phase: A: Water (0.05% TFA) B: ACN (0.05% TFA); Gradient: 20% B for 1 min, increase to 80% B within 20 min, increase to 95% B within 1 min, hold for 5 min, back to 20% B within 0.1 min. Flow Rate: 1 mL/min; Column: XBridge Peptide BEH C18, 4.6*150 mm, 3.5 m. Column Temperature: 40° C. Purity by SFC: 99.83%, Column AD-H: RT 1.71 min; 100%, Column AS-H: RT 3.53 min; 100%, Column OD-H: RT 1.48 min; 99.70%, Column OJ-H: RT 2.42 min.

### Example 7. Synthesis of a Compound

[chemical structure]

[2635] Preparation of compound 2. A mixture of compound 1 (30.0 g, 340 mmol, 31.5 mL, 1 eq), t-BuOH (27.7 g, 374 mmol, 35.8 mL, 1.1 eq), TEA (68.9 g, 681 mmol, 94.7 mL, 2 eq), and 4-pyrrolidin-1-ylpyridine (2.52 g, 17.0 mmol, 0.05 eq) in dioxane (20 mL) was stirred at −20° C. for 0.5 hr and then Boc₂O (96.6 g, 442 mmol, 101 mL, 1.3 eq) was added. The resulting mixture was stirred at 20° C. for 7.5 hrs. TLC (petroleum ether/ethyl acetate=10/1) showed starting material (R_{f}=0.1) was consumed completely. The mixture was diluted with DCM (100 mL), washed with 2N HCl (100 mL*2) and sat.aq.NaHCO₃ (100 mL), dried over anhydrous sodium sulfate and filtered. The filtrate was purified through distillation (62° C.) under reduced pressure (vacuum degree:-0.95 MPa) to give compound 2 (27.0 g, 187 mmol, 55.0% yield) as a colorless oil. ¹H NMR: 400 MHz CDCl3: δ=3.71 (s, 1H), 2.39-2.46 (m, 1H), 1.45 (s, 9H), 1.12 (d, J=8.0 Hz, 6H).

[2636] Preparation of compound 3. To a solution of i-Pr₂NH (28.2 g, 279 mmol, 39.4 mL, 1.15 eq) in THF (80.0 mL) was added drop-wise n-BuLi (2.5 M, 106 mL, 1.1 eq) at −78° C. and stirred for 1 hr. The fresh prepared LDA was added drop-wise to a solution of compound 2 (35.0 g, 242 mmol, 1 eq) in THF (80.0 mL) at 0° C. After addition, the reaction was stirred at 20° C. for 1 hr before cooling back to 0° C. A solution of compound 2a (39.7 g, 266 mmol, 28.7 mL, 80% purity, 1.1 eq) in THF (20.0 mL) was added drop-wise. The resulting mixture was stirred at 20° C. for 10 hrs. TLC (petroleum ether/ethyl acetate=5/1) showed new spot (R_{f}=0.65) formed. The mixture was quenched with water (150 mL), the organic phase was separated and the aqueous layer extracted with MTBE (3×60.0 mL). The combined organic layers were washed with a saturated aqueous NaCl solution, dried over sodium sulphate, filtered and concentrated in vacuo. The obtained crude oil was distilled (94° C., —0.95Mpa) to give compound 3 (27.0 g, 148 mmol, 61.0% yield) as a colorless oil. ¹H NMR: 400 MHz CDCl₃: δ=2.39 (d, J=8.0 Hz, 2H), 1.99 (t, J=4.0 Hz, 1H), 1.45 (s, 9H), 1.24 (s, 6H).

[2637] Preparation of compound 4. To a solution of compound 3 (16.7 g, 119 mmol, 1.2 eq) in THF (200 mL) was added a solution of CuSO₄·5H₂O (868 mg, 3.48 mmol, 0.035 eq) and L-Ascorbic Acid Sodium Salt (5.12 g, 25.8 mmol, 0.26 eq) in H₂O (100 mL) followed by addition of a solution of compound 3a (35 g, 99.33 mmol, 1 eq) in THF (200 mL) and H₂O (200 mL). The resulting mixture was stirred at 30° C. for 12 hrs. LCMS showed desired MS (Rt=0.977 min) was detected. The mixture was concentrated under vacuum to remove THF and white solids were precipitated out, filtered. The solid was triturated with MeOH/H₂O (1/1, 2 L) to give compound 4 (22.0 g, 39.7 mmol, 40.0% yield, 96.5% purity) as a white solid. In one LCMS run: Rt=0.977 min, m/z: [M+H]⁺=535.4. In another LCMS run: Rt=0.956 min, m/z: [M+H]⁺=535.3. In a HPLC run: Rt=2.601 min. ¹H NMR: 400 MHz DMSO-d6: δ=7.88 (d, J=8.0 Hz, 2H), 7.63-7.71 (m, 4H), 7.41 (t, J=8.0 Hz, 2H), 7.32 (t, J=8.0 Hz, 2H), 4.75 (s, 1H), 4.33-4.68 (m, 2H), 4.10-4.29 (m, 3H), 2.75 (s, 2H), 1.36 (s, 9H), 1.02 (d, J=2.4 Hz, 1H).

### Example 8. Synthesis of a Compound

[chemical structure]

[2639] To a solution of compound 1a (5.00 g, 23.3 mmol, 1.00 eq), compound 1 (14.4 g, 35.0 mmol, 1.50 eq) and DMAP (142 mg, 1.17 mmol, 0.050 eq) in dichloromethane (80.0 mL) was added DIC (3.59 g, 28.4 mmol, 4.41 mL, 1.22 eq) under a nitrogen atmosphere. The reaction was stirred at 20° C. for 14 hrs. LCMS showed the starting material was consumed completely with desired mass (in one run, Rt=1.080 min) was detected. TLC (Petroleum ether:Ethyl acetate=3:1) also showed the starting material (Rf=0.89) was consumed completely with six new spots (R_{f}=0.37) formed. The mixture was filtered and the precipitate was washed with dichloromethane (10.0 mL*3). The filtrate was concentrated under reduced pressure. The residue was purified by column chromatography (SiO₂, Petroleum ether:Ethyl acetate=50:1 to 2:1, R_{f}=0.37). The compound 2 (14.9 g, crude) was obtained as yellow oil. LCMS: product: Rt=1.080 min, m/z=630 (M+H)+. ¹HNMR: CDCl₃, 400 MHz: δ: 7.71 (d, J=7.6 Hz, 2H), 7.62 (d, J=7.6 Hz, 2H), 7.41 (t, J=7.6 Hz, 2H), 7.32 (td, J=7.6 Hz, J₂=0.8 Hz, 2H), 6.10 (s, 2H), 5.80 (d, J=8.4 Hz, 1H), 4.55-4.51 (m, 1H), 4.42-4.36 (m, 2H), 4.30-4.22 (m, 3H), 3.80-3.79 (m, 9H), 3.24-3.04 (m, 2H), 1.49 (s, 9H).

[2640] To a solution of compound 2 (12.9 g, 21.2 mmol, 1.00 eq) in dichloromethane (45.0 mL) was added TFA (23.1 g, 202 mmol, 15.0 mL, 9.54 eq), the reaction was stirred at 20° C. for 14 hrs. LCMS showed the starting material was consumed completely with desired mass (Rt=0.828 min, m/z=550) was detected. The volatiles (Dichloromethane, TFA) was removed under reduced pressure. The crude product was purified by reversed-phase HPLC (FA). Compound 3 (5.52 g, 9.64 mmol, 45.4% yield, 96.3% purity) was obtained as light yellow solid. In a LCMS run: product: Rt=0.828 min, m/z=550.2 (M−H)⁻. In another LCMS run: product: Rₜ=0.835 min, m/z=550.2 (M−H)⁻. HPLC: product: Rₜ=3.566 min, purity: 96.3%. ¹HNMR: CDCl₃, 400 MHz: δ: 7.77 (d, J=7.6 Hz, 2H), 7.61 (d, J=7.2 Hz, 2H), 7.41 (t, J=7.6 Hz, 2H), 7.32 (td, J₁=7.6 Hz, J₂=0.8 Hz, 2H), 6.10 (s, 2H), 5.82 (d, J=8.0 Hz, 1H), 4.70-4.67 (m, 1H), 4.44-4.39 (m, 2H), 4.28-4.26 (m, 2H), 4.25-4.23 (m, 1H), 3.80 (s, 9H), 3.35-3.31 (m, 2H).

### Example 9. Synthesis of a Compound

[chemical structure]

[2642] To a solution of compound 1a (5.00 g, 23.3 mmol, 1.00 eq), compound 1 (14.8 g, 35.0 mmol, 1.50 eq) and DMAP (142 mg, 1.17 mmol, 0.050 eq) in Dichloromethane (80.0 mL) was added DIC (3.59 g, 28.4 mmol, 4.41 mL, 1.22 eq) under a nitrogen atmosphere. The reaction was stirred at 20° C. for 14 hrs. LCMS showed the starting material was consumed completely with desired mass (Rt=1.081 min) was detected. TLC (Petroleum ether:Ethyl acetate=3:1) also showed the starting material (Rf=0.88) was consumed completely with six new spots (Rf=0.30) formed. The mixture was filtered and the precipitate was washed with Dichloromethane (10.0 mL*3). The filtrate was concentrated under reduced pressure. The residue was purified by column chromatography (SiO₂, Petroleum ether:Ethyl acetate=50:1 to 2:1, Rf=0.30). The compound 2 (15.8 g, crude) was obtained as colorless oil. LCMS: product: Rt=1.081 min, m/z=644 (M+H)+. ¹HNMR: CDCl₃, 400 MHz δ: 7.77 (d, J=7.2 Hz, 2H), 7.61 (d, J=7.6 Hz, 2H), 7.40 (t, J=7.6 Hz, 2H), 7.32 (tt, J₁=7.6 Hz, J₂=1.2 Hz, 2H), 6.10 (s, 2H), 5.39 (d, J=8.0 Hz, 1H), 4.47-4.34 (m, 2H), 4.31-4.25 (m, 1H), 4.24-4.20 (m, 3H), 3.80 (s, 9H), 2.67-2.53 (m, 2H), 2.28-0.20 (m, 1H), 2.03-1.99 (m, 1H), 1.48 (s, 9H).

[2643] To a solution of compound 2 (15.8 g, 25.4 mmol, 1.00 eq) in dichloromethane (45.0 mL) was added TFA (23.1 g, 202 mmol, 15.0 mL, 7.97 eq), the reaction was stirred at 20° C. for 14 hrs. LCMS showed the starting material was consumed completely with desired mass (Rt=0.829 min, m/z=564) was detected. The volatiles (Dichloromethane, TFA) was removed under reduced pressure. The crude product was purified by reversed-phase HPLC (FA). Compound 3 (6.57 g, 11.4 mmol, 45.1% yield, 98.7% purity) was obtained as white solid. In a LCMS run: product: Rt=0.829 min, m/z=564.3 (M−H)⁻. In another LCMS run: product: Rt=0.838 min, m/z=564.3 (M−H)⁻. In a HPLC run: product: Rt=3.593 min, purity: 98.7%. ¹HNMR: CDCl₃, 400 MHz: δ: 7.76 (d, J=7.6 Hz, 2H), 7.60 (d, J=7.2 Hz, 2H), 7.40 (t, J=7.6 Hz, 2H), 7.32 (t, J=7.6 Hz, 2H), 6.10 (s, 2H), 5.53 (d, J=8.0 Hz, 1H), 4.53-4.46 (m, 3H), 4.27-4.21 (m, 3H), 3.79 (s, 9H), 2.77-2.53 (m, 2H), 2.33-2.28, m, 1H), 2.16-2.04, m, 1H).

[2644] In some embodiments, it was confirmed that various peptides, e.g., stapled peptides, comprising residues of amino acids described herein can provide higher affinity than reference peptides that comprise a reference amino acid, e.g., a natural amino acid such as Asp or Glu, but are otherwise identical.

[2645] While various embodiments have been described and illustrated herein, those of ordinary skill in the art will readily envision a variety of other means and/or structures for performing the functions and/or obtaining the results and/or one or more of the advantages described in the present disclosure, and each of such variations and/or modifications is deemed to be included. More generally, those skilled in the art will readily appreciate that all parameters, dimensions, materials, and configurations described herein are meant to be example and that the actual parameters, dimensions, materials, and/or configurations will depend upon the specific application or applications for which the teachings of the present disclosure is/are used. Those skilled in the art will recognize, or be able to ascertain using no more than routine experimentation, many equivalents to the specific embodiments of the disclosure described in the present disclosure. It is, therefore, to be understood that the foregoing embodiments are presented by way of example only and that, provided technologies, including those to be claimed, may be practiced otherwise than as specifically described and claimed. In addition, any combination of two or more features, systems, articles, materials, kits, and/or methods, if such features, systems, articles, materials, kits, and/or methods are not mutually inconsistent, is included within the scope of the present disclosure.

1. An agent, wherein the agent is or comprise a peptide comprising:
X¹X²X³X⁴X⁵X⁶X⁷X⁸X⁹X¹⁰X¹¹X¹²X¹³[X¹⁴]ₚ₁₄[X¹⁵]ₚ₁₅[X¹⁶]ₚ₁₆[X¹⁷]ₚ₁₇,
wherein:
each of p14, p15, p16 and p17 is independently 0 or 1;
each of X¹, X², X³, X⁴, X⁵, X⁶, X⁷, X⁸, X⁹, X¹⁰, X¹¹, X¹², X¹³, X¹⁴, X¹⁵, X¹⁶, and X¹⁷ is independently an amino acid residue, wherein:
X² comprises a side chain comprising an acidic group;
X⁵ comprises a side chain comprising an acidic group;
X⁶ comprises a side chain comprising an acidic group;
X⁹ comprises a side chain comprising an optionally substituted aromatic group;
X² comprises a side chain comprising an optionally substituted aromatic group;
X¹³ comprises a side chain comprising an optionally substituted aromatic group; and wherein:
X¹ and X⁴ are stapled and X⁴ and X¹¹ are stapled.

2. An agent, wherein the agent is or comprise a peptide comprising:
X¹X²X³X⁴X⁵X⁶X⁷X⁸X⁹X¹⁰X¹¹X¹²X¹³[X¹⁴]ₚ₁₄[X¹⁵]ₚ₁₅[X¹⁶]ₚ₁₆[X¹⁷]ₚ₁₇,
wherein:
each of p14, p15, p16 and p17 is independently 0 or 1;
each of X¹, X², X³, X⁴, X⁵, X⁶, X⁷, X⁸, X⁹, X¹⁰, X¹¹, X¹², X¹³, X¹⁴, X¹⁵, X¹⁶, and X¹⁷ is independently an amino acid residue, wherein:
X² comprises a side chain comprising an acidic or polar group;
X⁵ comprises a side chain comprising an acidic or polar group;
X⁹ comprises a side chain comprising an optionally substituted aromatic group;
X² comprises a side chain comprising an optionally substituted aromatic group; and
X¹³ comprises a side chain comprising an optionally substituted aromatic group.

3. An agent, wherein the agent is or comprises:
X¹X²X³X⁴X⁵X⁶X⁷X⁸X⁹X¹⁰X¹¹X¹²X¹³[X¹⁴]ₚ₁₄[X¹⁵]ₚ₁₅[X¹⁶]ₚ₁₆[X¹⁷]ₚ₁₇[X¹⁸]p¹⁸[X¹⁹]ₚ₁₉[X²⁰]ₚ₂₀[X²¹]ₚ₂₁[X²²]ₚ₂₂[X²³]ₚ₂₃,
wherein: each of p14, p15, p16, p17, p18, p19, p20, p21, p22, and p23 is independently 0 or 1, and each of X¹, X², X³, X⁴, X⁵, X⁶, X⁷, X⁸, X⁹, X¹⁰, X¹¹, X¹², X¹³, X¹⁴, X¹⁵, X¹⁶, X¹⁷, X¹⁸, X¹⁹, X²⁰, X²¹, X²², and X²³ is independently an amino acid residue.

4. An agent, wherein the agent is or comprises:
[X]pX¹X²X³X⁴X⁵X⁶X⁷X⁸X⁹X¹⁰X¹¹X¹²X¹³[X¹⁴]ₚ₁₄[X¹⁵]ₚ₁₅[X¹⁶]ₚ₁₆[X¹⁷]ₚ₁₇[X]p′;
wherein:
each of p14, p15, p¹⁶ and p17 is independently 0 or 1;
each of p and p′ is independently 0-10;
each of X, X¹, X², X³, X⁴, X⁵, X⁶, X⁷, X⁸, X⁹, X¹⁰, X¹¹, X¹², X¹³, X¹⁴, X¹⁵, X¹⁶, and X¹⁷ is independently an amino acid residue.

5. An agent, wherein the agent is or comprise a peptide comprising:
X¹X²X³X⁴X⁵X⁶X⁷X⁸X⁹X¹⁰X¹¹X¹²X¹³[X¹⁴]ₚ₁₄[X¹⁵]ₚ₁₅[X¹⁶]ₚ₁₆[X¹⁷]ₚ₁₇,
wherein:
each of p14, p15, p16 and p17 is independently 0 or 1;
each of X¹, X², X³, X⁴, X⁵, X⁶, X⁷, X⁸, X⁹, X¹⁰, X¹¹, X¹², X¹³, X¹⁴, X¹⁵, X¹⁶, and X¹⁷ is independently an amino acid residue, wherein:
X² comprises a side chain comprising an acidic or polar group;
X⁵ comprises a side chain comprising an acidic or polar group;
X⁹ comprises a side chain comprising an optionally substituted aromatic group;
X² comprises a side chain comprising an optionally substituted aromatic group;
X¹³ comprises a side chain comprising an optionally substituted aromatic group; and wherein:
X¹ and X⁴, and/or X⁴ and X¹¹ are independently amino acid residues suitable for stapling, or are stapled, or X³ and X¹⁰ are independently amino acid residues suitable for stapling, or are stapled.

6. A agent having the structure of formula I:
R^{N}-L^{P1}-L^{AA1}-L^{P2}L^{AA2}-L^{P3}-L^{AA3}-L^{P4}-L^{AA4}-L^{P5}-L^{AA5}-L^{P6}-L^{AA6}-L^{P7}-R^{C} I
or a salt thereof, wherein:
R^{N} is a peptide, an amino protecting group or R′-L^{RN}-;
each of L^{P1}, L^{P2}, L^{P3}, L^{P4}, L^{P5}, L^{P6}, and L^{P7} is independently L, wherein L^{P1}, L^{P2}, L^{P3}, L^{P4}, L^{P5}, L^{P6}, and L^{P7} comprise:
a first R′ group and a second R′ group which are taken together to form -L^{s}- which is bonded to the atom to which a first R′ group is attached and the atom to which a second R′ group is attached; and
a third R′ group and a fourth R′ group which are taken together to form -L^{s}- which is bonded to the atom to which a third R′ group is attached and the atom to which a fourth R′ group is attached;
each L^{s} is independently -L^{s1}-L^{s2}-L^{s3}-, wherein each L^{s1}, L^{s2} and L^{s3} is independently L;
L^{AA1} is an amino acid residue that comprises a side chain comprising an acidic or polar group;
L^{AA2} is an amino acid residue that comprises a side chain comprising an acidic or polar group;
L^{AA3} is an amino acid residue;
L^{AA4} is an amino acid residue that comprises a side chain comprising an optionally substituted aromatic group;
L^{AA5} is an amino acid residue that comprises a side chain comprising an optionally substituted aromatic group;
L^{AA6} is an amino acid residue that comprises a side chain comprising an optionally substituted aromatic group;
R^{C} is a peptide, a carboxyl protecting group, -L^{RC}-R′, —O-L^{RC}-R′ or —N(R′)-L^{RC}-R′;
each of L^{RN} and L^{RC} is independently L;
each L is independently a covalent bond, or an optionally substituted, bivalent C₁-C₂₅ aliphatic or heteroaliphatic group having 1-10 heteroatoms, wherein one or more methylene units of the group are optionally and independently replaced with —C(R′)₂—, -Cy-, —O—, —S—, —S—S—, —N(R′)—, —C(O)—, —C(S)—, —C(NR′)—, —C(O)N(R′)—, —N(R′)C(O)N(R′)—, —N(R′)C(O)O—, —S(O)—, —S(O)₂—, —S(O)₂N(R′)—, —C(O)S—, or —C(O)O—;
each -Cy- is independently an optionally substituted bivalent, 3-30 membered, monocyclic, bicyclic or polycyclic ring having 0-10 heteroatoms;
each R′ is independently -L-R, —C(O)R, —CO₂R, or —SO₂R;
each R is independently —H, or an optionally substituted group selected from C₁-30 aliphatic, C₁₋₃₀ heteroaliphatic having 1-10 heteroatoms, C₆₋₃₀ aryl, C₆₋₃₀ arylaliphatic, C₆₋₃₀ arylheteroaliphatic having 1-10 heteroatoms, 5-30 membered heteroaryl having 1-10 heteroatoms, and 3-30 membered heterocyclyl having 1-10 heteroatoms, or
two R groups are optionally and independently taken together to form a covalent bond, or:
two or more R groups on the same atom are optionally and independently taken together with the atom to form an optionally substituted, 3-30 membered, monocyclic, bicyclic or polycyclic ring having, in addition to the atom, 0-10 heteroatoms; or
two or more R groups on two or more atoms are optionally and independently taken together with their intervening atom(s) to form an optionally substituted, 3-30 membered, monocyclic, bicyclic or polycyclic ring having, in addition to the intervening atom(s), 0-10 heteroatoms.

7. A agent having the structure of formula I:
R^{N}-L^{P1}-L^{AA1}-L^{P2}L^{AA2}-L^{P3}-L^{AA3}-L^{P4}-L^{AA4}-L^{P5}-L^{AA5}-L^{P6}-L^{AA6}-L^{P7}-R^{C} I
or a salt thereof, wherein:
R^{N} is a peptide, an amino protecting group or R′-L^{RN}-;
each of L^{P1}, L^{P2}, L^{P3}, L^{P4}, L^{P5}, L^{P6}, and L^{P7} is independently L, wherein L^{P1}, L^{P2}, L^{P3}, L^{P4}, L^{P5}, L^{P6}, and L^{P7} comprise:
a first R′ group and a second R′ group which are taken together to form -L^{s}- which is bonded to the atom to which a first R′ group is attached and the atom to which a second R′ group is attached; and
a third R′ group and a fourth R′ group which are taken together to form -L^{s}- which is bonded to the atom to which a third R′ group is attached and the atom to which a fourth R′ group is attached;
each L^{s} is independently -L^{s1}-L^{s2}-L^{s3}-, wherein each L^{s1}, L^{s2} and L^{s3} is independently L;
L^{AA1} is L^{AR}, wherein a methylene unit is replaced with —C(R′)(R^{AS})—, wherein R^{AS} is -L^{AS1}-R^{AA1}, wherein R^{AA1} is CO₂R or —SO₂R;
L^{AA2} is L^{AR}, wherein a methylene unit is replaced with —C(R′)(R^{AS})—, wherein R^{AS} is -L^{AS2}-R^{AA2} wherein R^{AA2} is —CO₂R, or —SO₂R;
L^{AA3} is L^{AR}, wherein a methylene unit is replaced with —C(R′)(R^{AS})—, wherein R^{AS} is -L^{AS3}-R^{AA3} wherein R^{AA3} is R′;
L^{AA4} is L^{AR}, wherein a methylene unit is replaced with —C(R′)(R^{AS})—, wherein R^{AS} is -L^{AS4}-R^{AA4} wherein R^{AA4} is an optionally substituted group selected from 6-14 membered aryl or 5-14 membered heteroaryl having 1−6 heteroatoms;
L^{AA5} is L^{AR}, wherein a methylene unit is replaced with —C(R′)(R^{AS})—, wherein R^{AS} is -L^{AS5}-R^{AA5}, wherein R^{AA5} is an optionally substituted group selected from 6-14 membered aryl or 5-14 membered heteroaryl having 1−6 heteroatoms;
L^{AA6} is L^{AR}, wherein a methylene unit is replaced with —C(R′)(R^{AS})—, wherein R^{AS} is -L^{AS6}-R^{AA6} wherein R^{AA6} is an optionally substituted group selected from 6-14 membered aryl or 5-14 membered heteroaryl having 1−6 heteroatoms;
R^{C} is a peptide, a carboxyl protecting group, -L^{RC}-R′, —O-L^{RC}-R′ or —N(R′)-L^{RC}-R′;
each of L^{RN} and L^{RC} is independently L;
each L^{A}R is independently an optionally substituted, bivalent C₁-C₆ aliphatic group, wherein one or more methylene units of the group are optionally and independently replaced with —C(R′)₂—, —C(R′)(R^{PS})—, -Cy-, —O—, —S—, —S—S—, —N(R′)—, —C(O)—, —C(S)—, —C(NR′)—, —C(O)N(R′)—, —N(R′)C(O)N(R′)—, —N(R′)C(O)O—, —S(O)—, —S(O)₂—, —S(O)₂N(R′)—, —C(O)S—, or —C(O)O—;
each of L^{AS1}, L^{AS2}, L^{AS3}, L^{AS4}, L^{AS5}, and L^{AS6} is independently L^{AS};
each R^{AA}s is independently -L^{AS}-R′;
each L^{AS} is independently a covalent bond or an optionally substituted, bivalent C₁-C₁₀ aliphatic or heteroaliphatic group having 1-5 heteroatoms, wherein one or more methylene units of the group optionally and independently replaced with —C(R′)₂—, -Cy-, —O—, —S—, —S—S—, —N(R′)—, —C(O)—, —C(S)—, —C(NR′)—, —C(O)N(R′)—, —N(R′)C(O)N(R′)—, —N(R′)C(O)O—, —S(O)—, —S(O)₂—, —S(O)₂N(R′)—, —C(O)S—, or —C(O)O—;
each L is independently a covalent bond, or an optionally substituted, bivalent C₁-C₂₅ aliphatic or heteroaliphatic group having 1-10 heteroatoms, wherein one or more methylene units of the group are optionally and independently replaced with —C(R′)₂—, -Cy-, —O—, —S—, —S—S—, —N(R′)—, —C(O)—, —C(S)—, —C(NR′)—, —C(O)N(R′)—, —N(R′)C(O)N(R′)—, —N(R′)C(O)O—, —S(O)—, —S(O)₂—, —S(O)₂N(R′)—, —C(O)S—, or —C(O)O—;
each -Cy- is independently an optionally substituted bivalent, 3-30 membered, monocyclic, bicyclic or polycyclic ring having 0-10 heteroatoms;
each R′ is independently -L-R, —C(O)R, —CO₂R, or —SO₂R;
each R is independently —H, or an optionally substituted group selected from C₁₋₃₀ aliphatic, C₁₋₃₀ heteroaliphatic having 1-10 heteroatoms, C₆₋₃₀ aryl, C₆₋₃₀ arylaliphatic, C₆₋₃₀ arylheteroaliphatic having 1-10 heteroatoms, 5-30 membered heteroaryl having 1-10 heteroatoms, and 3-30 membered heterocyclyl having 1-10 heteroatoms, or
two R groups are optionally and independently taken together to form a covalent bond, or:
two or more R groups on the same atom are optionally and independently taken together with the atom to form an optionally substituted, 3-30 membered, monocyclic, bicyclic or polycyclic ring having, in addition to the atom, 0-10 heteroatoms; or
two or more R groups on two or more atoms are optionally and independently taken together with their intervening atom(s) to form an optionally substituted, 3-30 membered, monocyclic, bicyclic or polycyclic ring having, in addition to the intervening atom(s), 0-10 heteroatoms.

8. The agent of any one of the preceding claims, wherein a second R′ group and a third R′ group are attached to the same atom, and wherein each of the first, second and fourth R′ groups is independently attached to a different atom, or:
wherein X¹ and X⁴, and X⁴ and X¹¹ are independently stapled.

9. The agent of claim 8, wherein the agent comprises a staple having the structure of L^{s} which is -L^{s1}-L^{s2}-L^{s3-}.

10. The agent of claim 9, wherein L^{s1} is a covalent bond, or an optionally substituted bivalent linear or branched, saturated or partially unsaturated C₁₋₁₀ hydrocarbon chain, wherein one or more methylene units are optionally and independently replaced with —C(R′)₂—, -Cy-, —O—, —S—, —S—S—, —S-Cy-S—, —N(R′)—, —C(O)—, —C(S)—, —C(NR′)—, —C(O)N(R′)—, —N(R′)C(O)N(R′)—, —N(R′)C(O)O—, —S(O)—, —S(O)₂—, —S(O)₂N(R′)—, —C(O)S—, or —C(O)O—.

11. The agent of claim 10, wherein L^{s1} is bond to a backbone carbon atom or nitrogen atom, or an alpha carbon atom of an amino acid residue.

12. The agent of claim 11, wherein L^{s2} is a covalent bond, or an optionally substituted bivalent linear or branched, saturated or partially unsaturated C₁₋₁₀ hydrocarbon chain, wherein one or more methylene units are optionally and independently replaced with —C(R′)₂—, -Cy-, —O—, —S—, —S—S—, —S-Cy-S—, —N(R′)—, —C(O)—, —C(S)—, —C(NR′)—, —C(O)N(R′)—, —N(R′)C(O)N(R′)—, —N(R′)C(O)O—, —S(O)—, —S(O)₂—, —S(O)₂N(R′)—, —C(O)S—, or —C(O)O—.

13. The agent of claim 12, wherein L^{s3} is a covalent bond, or an optionally substituted bivalent linear or branched, saturated or partially unsaturated C₁₋₁₀ hydrocarbon chain, wherein one or more methylene units are optionally and independently replaced with —C(R′)₂—, -Cy-, —O—, —S—, —S—S—, —S-Cy-S—, —N(R′)—, —C(O)—, —C(S)—, —C(NR′)—, —C(O)N(R′)—, —N(R′)C(O)N(R′)—, —N(R′)C(O)O—, —S(O)—, —S(O)₂—, —S(O)₂N(R′)—, —C(O)S—, or —C(O)O—.

14. The agent of claim 13, wherein L^{s3} is a bivalent C₁₋₆ aliphatic wherein one or more methylene units are independently replaced with —N(R′)—.

15. The agent of claim 14, wherein L^{s3} is bond to a carbon atom of the peptide backbone, or wherein L^{s3} is bond to an alpha carbon atom of an amino acid residue, or wherein L^{s3} is bond to a nitrogen atom of the peptide backbone.

16. The agent of claim 8, wherein the agent comprises a staple having the structure of —(CH₂)m-N(R′)—C(O)—O—(CH₂)ₙ—CH═CH—(CH₂)n′-, wherein each of m, n and n′ is independently 1, 2, 3, 4, 5, 6, 7, 8, 9, or 10, and each —CH₂— is independently optionally substituted.

17. The agent of any one of the preceding claims, wherein X¹ is —N(R^{a1})-L^{a1}-C(-L^{a}-R^{SP1})(R^{a3})-L^{a2}-C(O)—.

18. The agent of any one of the preceding claims, wherein X⁴ is a residue of an amino acid that comprises two olefins each independently suitable for stapling, or wherein X⁴ has the structure of —N(R^{a1})-L^{a1}-C(-L^{a}-R^{SP1})X-L^{a}-R^{SP2})-L^{a2}-C(O)—.

19. The agent of any one of the preceding claims, wherein X⁴ is B5.

20. The agent of any one of the preceding claims, wherein X″ is an amino acid residue suitable for stapling, or wherein X″ is —N(R^{a1})-L^{a1}-C(-L^{a}-R^{SP1})(R^{a3})-L^{a2}-C(O)—.

21. The agent of any one of claims 1-5, wherein X² or L^{AA1} comprises a side chain comprising —COOH or a salt form thereof.

22. The agent of claim 21, wherein X² or L^{AA1} is Asp or Glu.

23. The agent of claim 21, wherein X⁵ or L^{AA2} comprises a side chain comprising —COOH or a salt form thereof.

24. The agent of claim 22, wherein X⁵ or L^{AA2} is Asp or Glu.

25. The agent of claim 23, wherein X⁶ or L^{AA3} comprises a side chain comprising —COOH or a salt form thereof.

26. The agent of claim 21, wherein X⁶ or L^{AA3} is Asp or Glu.

27. The agent of claim 21, wherein X⁶ or L^{AA3}

[chemical structure]

28. The agent of claim 21, wherein X⁶ or L^{AA3} is

[chemical structure]

29. The agent of claim 25, wherein X⁹ or L^{AA4} comprises a side chain which is or comprises an optionally substituted aromatic group.

30. The agent of claim 29, wherein X⁹ or L^{AA4} is Phe.

31. The agent of claim 29, wherein X² or L^{A52} comprises a side chain which is or comprises an optionally substituted aromatic group.

32. The agent of claim 31, wherein X² or L^{AA5} is Phe.

33. The agent of claim 31, wherein X² or L^{AA5} is

[chemical structure]

34. The agent of claim 31, wherein X² or L^{AA5} is

[chemical structure]

[chemical structure]

35. The agent of claim 31, wherein the side chain of X¹³ or L^{AA6} comprises an optionally substituted aromatic group.

36. The agent of claim 35, wherein the side chain of X¹³ or L^{AA6} comprises an optionally substituted 9-membered bicyclic heteroaryl group having 1-3 heteroatoms.

37. The agent of claim 35, wherein X¹³ or L^{AA6} is

[chemical structure]

38. The agent of claim 35, wherein X¹³ or L^{AA6} is Trp.

39. The agent of any one of the preceding claims, wherein p14 is 1.

40. The agent of any one of the preceding claims, wherein X¹⁴ comprises a side chain comprising a polar group.

41. The agent of any one of the preceding claims, wherein the peptide has the structure of:
R^{N}—[X]ₚ-X¹X²X³X⁴X⁵X⁶X⁷X⁸X⁹X¹⁰X¹¹X¹²X¹³[X¹⁴]ₚ₁₄[X¹⁵]ₚ₁₅[X¹⁶]ₚ₁₆[X¹⁷]ₚ₁₇—[X]_{p′}-R^{C},
or a salt thereof, wherein:
each X is independently an amino acid residue;
each p and p′ is independently 0-10;
R^{N} is independently a peptide, an amino protecting group or R′-L^{RN}-;
R^{C} is independently a peptide, a carboxyl protecting group, -L^{RC}-R′, —O-L^{RC}-R′ or —N(R′)-L^{RC}-R′;
each of L^{RN} and L^{RC} is independently L;
each L is independently a covalent bond, or an optionally substituted, bivalent C₁-C₂₅ aliphatic or heteroaliphatic group having 1-10 heteroatoms, wherein one or more methylene units of the group are optionally and independently replaced with —C(R′)₂—, -Cy-, —O—, —S—, —S—S—, —N(R′)—, —C(O)—, —C(S)—, —C(NR′)—, —C(O)N(R′)—, —N(R′)C(O)N(R′)—, —N(R′)C(O)O—, —S(O)—, —S(O)₂—, —S(O)₂N(R′)—, —C(O)S—, or —C(O)O—;
each -Cy- is independently an optionally substituted bivalent, 3-30 membered, monocyclic, bicyclic or polycyclic ring having 0-10 heteroatoms;
each R′ is independently -L-R, —C(O)R, —CO₂R, or —SO₂R;
each R is independently —H, or an optionally substituted group selected from C₁₋₃₀ aliphatic, C₁₋₃₀ heteroaliphatic having 1-10 heteroatoms, C₆₋₃₀ aryl, C₆₋₃₀ arylaliphatic, C₆₋₃₀ arylheteroaliphatic having 1-10 heteroatoms, 5-30 membered heteroaryl having 1-10 heteroatoms, and 3-30 membered heterocyclyl having 1-10 heteroatoms, or
two R groups are optionally and independently taken together to form a covalent bond, or:
two or more R groups on the same atom are optionally and independently taken together with the atom to form an optionally substituted, 3-30 membered, monocyclic, bicyclic or polycyclic ring having, in addition to the atom, 0-10 heteroatoms; or
two or more R groups on two or more atoms are optionally and independently taken together with their intervening atom(s) to form an optionally substituted, 3-30 membered, monocyclic, bicyclic or polycyclic ring having, in addition to the intervening atom(s), 0-10 heteroatoms.

42. The agent of any one of the preceding claims, wherein R^{N} is —C(O)R.

43. The agent of any one of the preceding claims, wherein R^{N} is Ac, AzAc (N₃—CH₂—C(O)—), 2PyPrpc [chemical structure]
MeOPr (CH₃OCH₂CH₂C(O)—), MeSO₂ (—SO₂CH₃), mPEG2 (CH₃OCH₂CH₂OCH₂CH₂C(O)—), Nic [chemical structure]
Oct (CH₃(CH₂)₆C(O)—), or Pic

[chemical structure]

44. The agent of any one of the preceding claims, wherein R^{C} is —N(R′)₂, or wherein R^{C} is —NH₂, —NHEt, —NHBn, [chemical structure]
—NH—(CH₂)₆—NH₂, —NH—(CH₂)₆—N₃, [chemical structure]
or —OH.

45. The agent of any one of the preceding claims, wherein the peptide forms a structure that comprises a helix.

46. The agent of any one of the preceding claims, wherein the peptide binds to beta-catenin with a EC50 of no more than about 2000 nM, or no more than about 1500 nM, or no more than about 1000 nM, or no more than about 500 nM, or no more than about 300 nM, or no more than about 200 nM, or no more than about 100 nM, or no more than about 75 nM, or no more than about 50 nM, or no more than about 25 nM, or no more than about 10 nM as measured by fluorescence polarization.

47. The agent of any one of the preceding claims, wherein the peptide binds to a polypeptide whose sequence is or comprising SEQ ID NO: 2, or a fragment thereof:
(SEQ ID NO: 2)
SVLFYAITTLHNLLLHQEGAKMAVRLAGGLQKMVALLNKTNVKFLAITT
DCLQILAYGNQESKLIILASGGPQALVNIMRTYTYEKLLWTTSRVLKVL
SVCSSNKPAIVEAGGMQALGLHLTDPSQRLVQNCLWTLRNLSDAATKQE
GMEGLLGTLVQLLGSDDINVVTCAAGILSNLTCNNYKNKMMVCQVGGIE
ALVRT.

48. The agent of any one of the preceding claims, wherein the agent interacts with G307 of beta-catenin or an amino acid residue corresponding thereto, K312 of beta-catenin or an amino acid residue corresponding thereto, K345 of beta-catenin or an amino acid residue corresponding thereto, W383 of beta-catenin or an amino acid residue corresponding thereto, N387 of beta-catenin or an amino acid residue corresponding thereto, D413 of beta-catenin or an amino acid residue corresponding thereto, and/or N415 of beta-catenin or an amino acid residue corresponding thereto.

49. An agent having a structure selected from Table E3 or a salt thereof.

50. An agent has the structure of [chemical structure]
or a salt thereof; or
an agent has the structure of [chemical structure]
or a salt thereof; or
an agent has the structure of [chemical structure]
or a salt thereof.

51. The agent of claim 50, wherein a double bond of a staple bonded to the first amino acid from the N-terminus is E.

52. The agent of claim 50, wherein a double bond of a staple bonded to the first amino acid from the N-terminus is Z.

53. The agent of any one of claims 50-52, wherein a double bond of a staple bonded to the 11th amino acid from the N-terminus is E.

54. The agent of any one of claims 50-52, wherein a double bond of a staple bonded to the 11^{th} amino acid from the N-terminus is Z.

55. A compound having the structure of formula PA:
N(R^{PA})(R^{a1})-L^{a1}-C(R^{a2})(R^{a3})-L^{a2}-C(O)R^{PC} PA
or a salt thereof, wherein:
R^{PA} is —H or an amino protecting group;
each of R^{a1} and R^{a3} is independently -L^{a}-R′;
R^{a2} is -L^{aa}-C(O)R^{PS};
each of L^{a}, L^{a1} and L^{a2} is independently L;
—C(O)R^{PS} is optionally protected or activated —COOH;
—C(O)R^{C} is optionally protected or activated —COOH;
each L is independently a covalent bond, or an optionally substituted, bivalent C₁-C₂₅ aliphatic or heteroaliphatic group having 1-10 heteroatoms wherein one or more methylene units of the group are optionally and independently replaced with —C(R′)₂—, -Cy-, —O—, —S—, —S—S—, —N(R′)—, —C(O)—, —C(S)—, —C(NR′)—, —C(O)N(R′)—, —N(R′)C(O)N(R′)—, —N(R′)C(O)O—, —S(O)—, —S(O)₂—, —S(O)₂N(R′)—, —C(O)S—, or —C(O)O—;
each -Cy- is independently an optionally substituted bivalent, 3-30 membered, monocyclic, bicyclic or polycyclic ring having 0-10 heteroatoms;
each R′ is independently —R, —C(O)R, —CO₂R, or —SO₂R; and
each R is independently —H, or an optionally substituted group selected from C₁-30 aliphatic, C₁₋₃₀ heteroaliphatic having 1-10 heteroatoms, C₆₋₃₀ aryl, C₆₋₃₀ arylaliphatic, C₆₋₃₀ arylheteroaliphatic having 1-10 heteroatoms, 5-30 membered heteroaryl having 1-10 heteroatoms, and 3-30 membered heterocyclyl having 1-10 heteroatoms, or
two R groups are optionally and independently taken together to form a covalent bond, or:
two or more R groups on the same atom are optionally and independently taken together with the atom to form an optionally substituted, 3-30 membered, monocyclic, bicyclic or polycyclic ring having, in addition to the atom, 0-10 heteroatoms; or
two or more R groups on two or more atoms are optionally and independently taken together with their intervening atom(s) to form an optionally substituted, 3-30 membered, monocyclic, bicyclic or polycyclic ring having, in addition to the intervening atom(s), 0-10 heteroatoms.

56. The compound of claim 55, wherein L^{aa} is L and L^{aa} comprises —N(R′)— or -Cy-.

57. The compound of claim 55, having the structure of: [chemical structure]
or a salt thereof, wherein:
each of m and n is independently 1, 2, 3, or 4;
L^{RN} is L;
R^{RN} is R; and
R^{a5} is R′.

58. The compound of claim 55, wherein the compound has the structure of [chemical structure]
or a salt thereof, wherein Ring A is an optionally substituted 3-7 membered saturated, partially unsaturated or aromatic ring; or
wherein the compound has the structure of [chemical structure]
or a salt thereof, wherein Ring A is an optionally substituted 3-7 membered saturated, partially unsaturated or aromatic ring; or
wherein the compound has the structure of [chemical structure]
or a salt thereof, wherein:
Ring A is an optionally substituted 3-10 membered ring;
n is 0, 1, or 2; and
m is 0, 1, 2, or 3; or
wherein the compound has the structure of [chemical structure]
or a salt thereof, wherein:
Ring A is an optionally substituted 3-10 membered ring;
n is 0, 1, or 2; and
m is 0, 1, 2, or 3; or
wherein the compound has the structure of [chemical structure]
or a salt thereof, wherein:
Ring A is an optionally substituted 3-10 membered ring;
n is 0, 1, or 2; and
m is 0, 1, 2, or 3; or
wherein the compound has the structure of [chemical structure]
or a salt thereof, wherein:
Ring A is an optionally substituted 3-10 membered ring;
n is 0, 1, or 2; and
m is 0, 1, 2, or 3; or
wherein the compound has the structure of [chemical structure]
or a salt thereof, wherein:
Ring A is an optionally substituted 3-10 membered ring; and
n is 0, 1, or 2.

59. A compound having the structure of: [chemical structure]
or a salt thereof, wherein:
R^{PA} is —H or an amino protecting group;
—C(O)R^{PS} is optionally protected or activated —COOH; and
—C(O)R^{C} is optionally protected or activated —COOH.

60. A compound having the structure of: [chemical structure]
or a salt thereof, wherein:
R^{PA} is —H or an amino protecting group;
—C(O)R^{PS} is optionally protected or activated —COOH; and
—C(O)R^{C} is optionally protected or activated —COOH.

61. The compound of any one of claims 55-61, wherein RA is an amino protecting group suitable for peptide synthesis.

62. The compound of any one of claims 55-61, wherein R^{PA} is —C(O)—O—R; or wherein R^{PA} is -Fmoc.

63. The compound of any one of claims 55-62, wherein —C(O)R^{PS} is —C(O)OR′.

64. The compound of claim 63, wherein R′ is —H.

65. The compound of claim 63, wherein R′ is optionally substituted C₁₋₆ aliphatic.

66. The compound of any one of claims 55-62, —C(O)R^{PS} is —C(O)S-L-R′.

67. A compound, wherein the compound is [chemical structure]
or a salt thereof, or wherein the compound is [chemical structure]
or a salt thereof.

68. A compound, wherein the compound is [chemical structure]
or a salt thereof.

69. A compound, wherein the compound is [chemical structure]
or a salt thereof.

70. A compound, wherein the compound is [chemical structure]
or a salt thereof.

71. A compound, wherein the compound is [chemical structure]
or a salt thereof.

72. A compound, wherein the compound is [chemical structure]
or a salt thereof, or wherein the compound is [chemical structure]
or a salt thereof.

73. A compound, wherein the compound is [chemical structure]
or a salt thereof, or wherein the compound is [chemical structure]
or a salt thereof, or wherein the compound is [chemical structure]
or a salt thereof, or wherein the compound is [chemical structure]
or a salt thereof.

74. A compound, wherein the compound is [chemical structure]
or a salt thereof.

75. A compound, wherein the compound is [chemical structure]
or a salt thereof.

76. A compound, wherein the compound is [chemical structure]
or a salt thereof.

77. A compound, wherein the compound is [chemical structure]
or a salt thereof.

78. A compound, wherein the compound is [chemical structure]
or a salt thereof, or wherein the compound is [chemical structure]
or a salt thereof, wherein the compound is [chemical structure]
or a salt thereof, or wherein the compound is [chemical structure]
or a salt thereof.

79. The compound of any one of the preceding claims, wherein the compound has a purity of at least about 90%, 91%, 92%, 93%, 94%, 95%, 96%, 97%, 98%, or 99%.

80. A compound, comprising a residue of Table A-IV.

81. A compound, comprising a residue having the structure of [chemical structure] [chemical structure]
salt form thereof.

82. The compound of claim 81, wherein the compound is or comprise a peptide, or wherein the compound is or comprise a stapled peptide.

83. A method for preparing a compound of claim 81 or 82, comprising utilization of a compound of any one of the claims 55-79.

84. The agent of any one of the preceding claims, wherein each olefin double bond in a staple is independently and optionally converted into a single bond, or wherein each olefin double bond in a staple is converted into a single bond, or wherein each olefin double bond is converted into a single bond, or wherein each olefin double bond is independently and optionally converted into —CHR′—CHR′—, wherein each R is independently —H, —R, —OR, —OH, —N(R)₂, or —SR, or wherein each olefin double bond is converted into —CHR″—CHR″—, wherein each R is independently —H, —R, —OR, —OH, —N(R)₂, or —SR, or wherein each olefin double bond is independently and optionally converted into optionally substituted —CH₂—CH₂—, or wherein each olefin double bond is converted into —CH₂—CH₂—.

85. A pharmaceutical composition, comprising or delivering an agent or amino acid of any one of the preceding claims, and a pharmaceutically acceptable carrier; or
a composition selected from Table E3; or
a pharmaceutical composition, comprising or delivering one or more or all peptide agents in a composition selected from Table E3 and a pharmaceutically acceptable carrier.

86. A method for preparing an agent of any one of the preceding claims, comprising incorporating a residue of an amino acid of any one of the preceding claims.

87. A method for modulating beta-catenin interaction with a partner in a system, comprising contacting beta-catenin with an agent or composition of any one of the preceding claims; or
a method for modulating beta-catenin interaction with a partner in a system, comprising administering or delivering to the system an agent or composition of any one of the preceding claims; or
a method for modulating a TCF-beta-catenin interaction in a system, comprising contacting beta-catenin with an agent or composition of any one of the preceding claims; or
a method for modulating a TCF-beta-catenin interaction in a system, comprising administering or delivering to the system an agent or composition of any one of the preceding claims; or
a method for inhibiting beta-catenin dependent cell proliferation, comprising administering or delivering to the system an agent or composition of any one of the preceding claims; or
a method for modulating a TCF-beta-catenin interaction in a system, comprising administering or delivering to the system an agent or composition of any one of the preceding claims.

88. The method of claim 87, wherein a system is an in vitro system, or wherein a system is or comprises a cell, tissue or organ, or wherein a system is a subject.

89. A method for treating or preventing a condition, disorder or disease associated with beta-catenin in a subject, comprising administering or delivering to the subject an effective amount of an agent or composition of any one of the preceding claims; or
a method for treating cancer in a subject, comprising administering or delivering to the subject an effective amount of an agent or composition of any one of the preceding claims; or
a method for treating or preventing a condition, disorder or disease associated with beta-catenin interaction with a partner in a subject, comprising administering or delivering to the subject an effective amount of an agent or composition of any one of the preceding claims.

90. The method of claim 89, wherein the partner is TCF7, LEF1, TCF7L1, TCF7L2, Axin1, Axin2, or APC.

91. A method for treating or preventing a condition, disorder or disease associated with TCF-beta-catenin interaction in a subject, comprising administering or delivering to the subject an effective amount of an agent or composition of any one of the preceding claims.

92. The method of any one of the preceding claims, wherein the condition, disorder or disease is melanoma.

93. The method of any one of the preceding claims, comprising administering or deliver to a subject a second therapeutic agent or a second therapy.

94. The method of claim 93, wherein a second therapeutic agent or therapy is administered prior to an agent of any one of the preceding claims, or wherein a second therapeutic agent or therapy is administered about or no more than about 1, 2, 3, 4, 5, 6, or 7 days, or 1, 2, 3, or weeks, or 1, 2, 3, 4, 5, or 6 months, prior to an agent of any one of the preceding claims, or wherein a second therapeutic agent or therapy is administered concurrently with an agent of any one of the preceding claims, or wherein a second therapeutic agent or therapy is administered subsequently to an agent of any one of the preceding claims, or wherein a second therapeutic agent or therapy is administered about or no more than about 1, 2, 3, 4, 5, 6, or 7 days, or 1, 2, 3, or weeks, or 1, 2, 3, 4, 5, or 6 months, subsequently to an agent of any one of the preceding claims; and/or:
wherein a subject is exposed to a second therapeutic agent or therapy and an agent of any one of the preceding claims, or wherein a subject is exposed to a therapeutic effect of a second therapeutic agent or therapy and a therapeutic effect of an agent of any one of the preceding claims; and/or:
wherein a second therapeutic agent is or comprises a chemotherapy agent, or wherein a second therapeutic agent is or comprises a hormone therapy agent, or wherein a second therapeutic agent is or comprises an immunotherapy agent, or wherein a second therapeutic agent is or comprises a checkpoint inhibitor, or wherein a second therapeutic agent is or comprises an antibody, or wherein a second therapeutic agent is or comprises a CTLA-4, PD-1 or PD-L1 inhibitor, or wherein a second therapeutic agent is or comprises a cell; and/or:
wherein the second therapeutic agent reduces one or more side effects of an agent or composition of any one of the preceding claims, or wherein the agent or composition reduces one or more side effects of a second therapeutic agent; and/or:
wherein a second therapy is or comprises surgery, or wherein a second therapy is or comprises chemotherapy, or wherein a second therapy is or comprises radiotherapy, or wherein a second therapy is or comprises hormone therapy, or wherein a second therapy is or comprises stem cell or bone marrow transplant, or wherein a second therapy is or comprises immunotherapy, or wherein a second therapy is or comprises T-cell therapy, or wherein a second therapy is or comprises CAR T-cell therapy, or wherein a second therapy is or comprises administering to the subject a population of immune cells, or wherein the agent or composition reduces one or more side effects of a second therapy; and/or:
wherein unit dose of a second therapy or therapeutic agent is reduced compared to when it is administered alone, or wherein total dose of a second therapy or therapeutic agent is reduced compared to when it is administered alone, or wherein unit dose of an agent or composition of any one of the preceding claims is reduced compared to when it is administered alone, or wherein total dose of an agent or composition of any one of the preceding claims is reduced compared to when it is administered alone; and/or:
wherein the combination therapy provides higher efficacy than when an agent or composition is administered or delivered alone, or wherein the combination therapy provides higher efficacy than when a second therapeutic agent or therapy is administered or delivered alone.

95. An agent, compound, composition or method described in the specification or Embodiments 1-1241.

The application's sequence listing, which the Patent Office published only in electronic form, follows.

SEQUENCE LISTING (2049 sequences)

SEQ ID NO: 1 - protein, 781 aa, Homo sapiens
MATQADLMELDMAMEPDRKAAVSHWQQQSYLDSGIHSGATTTAPSLSGKGNPEEEDVDTSQVLYEWEQGFSQSFTQEQVADIDGQYAMTRAQRVRAAMFPETLDEGMQIPSTQFDAAHPTNVQRLAEPSQMLKHAVVNLINYQDDAELATRAIPELTKLLNDEDQVVVNKAAVMVHQLSKKEASRHAIMRSPQMVSAIVRTMQNTNDVETARCTAGTLHNLSHHREGLLAIFKSGGIPALVKMLGSPVDSVLFYAITTLHNLLLHQEGAKMAVRLAGGLQKMVALLNKTNVKFLAITTDCLQILAYGNQESKLIILASGGPQALVNIMRTYTYEKLLWTTSRVLKVLSVCSSNKPAIVEAGGMQALGLHLTDPSQRLVQNCLWTLRNLSDAATKQEGMEGLLGTLVQLLGSDDINVVTCAAGILSNLTCNNYKNKMMVCQVGGIEALVRTVLRAGDREDITEPAICALRHLTSRHQEAEMAQNAVRLHYGLPVVVKLLHPPSHWPLIKATVGLIRNLALCPANHAPLREQGAIPRLVQLLVRAHQDTQRRTSMGGTQQQFVEGVRMEEIVEGCTGALHILARDVHNRIVIRGLNTIPLFVQLLYSPIENIQRVAAGVLCELAQDKEAAEAIEAEGATAPLTELLHSRNEGVATYAAAVLFRMSEDKPQDYKKRLSVELTSSLFRTEPMAWNETADLGLDIGAQGEPLGYRQDDPSYRSFHSGGYGQDALGMDPMMEHEMGGHHPGADYPVDGLPDLGHAQDLMDGLPPGDSNQLAWFDTDL

SEQ ID NO: 2 - protein, 201 aa, Homo sapiens
SVLFYAITTLHNLLLHQEGAKMAVRLAGGLQKMVALLNKTNVKFLAITTDCLQILAYGNQESKLIILASGGPQALVNIMRTYTYEKLLWTTSRVLKVLSVCSSNKPAIVEAGGMQALGLHLTDPSQRLVQNCLWTLRNLSDAATKQEGMEGLLGTLVQLLGSDDINVVTCAAGILSNLTCNNYKNKMMVCQVGGIEALVRT

SEQ ID NO: 3 - protein, 17 aa, Homo sapiens
LQILAYGNQESKLIILA

SEQ ID NO: 4 - protein, 13 aa, Homo sapiens
SRVLKVLSVCSSN

SEQ ID NO: 5 - protein, 16 aa, Homo sapiens
RLVQNCLWTLRNLSDA

SEQ ID NO: 6 - protein, 15 aa, Homo sapiens
LGSDDINVVTCAAGI

SEQ ID NO: 7 - protein, 14 aa, Artificial Sequence
  Description of Artificial Sequence: Synthetic peptide
  N-term Acetic Acid
  MOD_RES (4)..(4): (R)-4-(((allyloxy)carbonyl)(methyl)amino)-2-amino-2- methylbutanoic acid
  MOD_RES (11)..(11): (S)-2-amino-2-methylnon-8-enoic acid
  C-term amino
FDAXDDAAFVXFWQ

SEQ ID NO: 8 - protein, 14 aa, Artificial Sequence
  Description of Artificial Sequence: Synthetic peptide
  N-term Acetic Acid
  MOD_RES (4)..(4): (R)-2-amino-2-methyldec-9-enoic acid
  MOD_RES (11)..(11): (S)-1-((allyloxy)carbonyl)-3-aminopyrrolidine-3-carboxylic acid
  C-term amino
FDAXDEAAFVXFWQ

SEQ ID NO: 9 - protein, 14 aa, Artificial Sequence
  Description of Artificial Sequence: Synthetic peptide
  N-term Acetic Acid
  MOD_RES (4)..(4): (R)-2-amino-2-methyldec-9-enoic acid
  MOD_RES (6)..(6): (S)-2-aminohexanedioic acid
  MOD_RES (11)..(11): (S)-1-((allyloxy)carbonyl)-3-aminopyrrolidine-3-carboxylic acid
  C-term amino
FDAXDXAAFVXFWQ

SEQ ID NO: 10 - protein, 14 aa, Artificial Sequence
  Description of Artificial Sequence: Synthetic peptide
  N-term Acetic Acid
  MOD_RES (4)..(4): (R)-2-amino-2-methyldec-9-enoic acid
  MOD_RES (6)..(6): (S)-4-(2-amino-2-carboxyethyl)benzoic acid
  MOD_RES (11)..(11): (S)-1-((allyloxy)carbonyl)-3-aminopyrrolidine-3-carboxylic acid
  C-term amino
FDAXDXAAFVXFWQ

SEQ ID NO: 11 - protein, 14 aa, Artificial Sequence
  Description of Artificial Sequence: Synthetic peptide
  N-term Acetic Acid
  MOD_RES (4)..(4): (R)-2-amino-2-methyldec-9-enoic acid
  MOD_RES (6)..(6): (S)-2-amino-3-(pyridin-3-yl)propanoic acid
  MOD_RES (11)..(11): (S)-1-((allyloxy)carbonyl)-3-aminopyrrolidine-3-carboxylic acid
  C-term amino
FDAXDXAAFVXFWQ

SEQ ID NO: 12 - protein, 14 aa, Artificial Sequence
  Description of Artificial Sequence: Synthetic peptide
  N-term Acetic Acid
  MOD_RES (4)..(4): (R)-2-amino-2-methyldec-9-enoic acid
  MOD_RES (6)..(6): (S)-3-([1,1'-biphenyl]-4-yl)-2-aminopropanoic acid
  MOD_RES (11)..(11): (S)-1-((allyloxy)carbonyl)-3-aminopyrrolidine-3-carboxylic acid
  C-term amino
FDAXDXAAFVXFWQ

SEQ ID NO: 13 - protein, 14 aa, Artificial Sequence
  Description of Artificial Sequence: Synthetic peptide
  N-term Acetic Acid
  MOD_RES (4)..(4): (R)-2-amino-2-methyldec-9-enoic acid
  MOD_RES (6)..(6): (S)-2-aminohexanoic acid
  MOD_RES (11)..(11): (S)-1-((allyloxy)carbonyl)-3-aminopyrrolidine-3-carboxylic acid
  C-term amino
FDAXDXAAFVXFWQ

SEQ ID NO: 14 - protein, 14 aa, Artificial Sequence
  Description of Artificial Sequence: Synthetic peptide
  N-term Acetic Acid
  MOD_RES (4)..(4): (R)-2-amino-2-methyldec-9-enoic acid
  MOD_RES (6)..(6): (S)-2-amino-3-cyclohexylpropanoic acid
  MOD_RES (11)..(11): (S)-1-((allyloxy)carbonyl)-3-aminopyrrolidine-3-carboxylic acid
  C-term amino
FDAXDXAAFVXFWQ

SEQ ID NO: 15 - protein, 14 aa, Artificial Sequence
  Description of Artificial Sequence: Synthetic peptide
  N-term Acetic Acid
  MOD_RES (4)..(4): (R)-2-amino-2-methyldec-9-enoic acid
  MOD_RES (6)..(6): (S)-2-amino-5-methylhexanoic acid
  MOD_RES (11)..(11): (S)-1-((allyloxy)carbonyl)-3-aminopyrrolidine-3-carboxylic acid
  C-term amino
FDAXDXAAFVXFWQ

SEQ ID NO: 16 - protein, 14 aa, Artificial Sequence
  Description of Artificial Sequence: Synthetic peptide
  N-term Acetic Acid
  MOD_RES (4)..(4): (R)-2-amino-2-methyldec-9-enoic acid
  MOD_RES (11)..(11): (S)-1-((allyloxy)carbonyl)-3-aminopyrrolidine-3-carboxylic acid
  C-term amino
FDAXDDADFVXFWQ

SEQ ID NO: 17 - protein, 14 aa, Artificial Sequence
  Description of Artificial Sequence: Synthetic peptide
  N-term Acetic Acid
  MOD_RES (4)..(4): (R)-2-amino-2-methyldec-9-enoic acid
  MOD_RES (11)..(11): (S)-1-((allyloxy)carbonyl)-3-aminopyrrolidine-3-carboxylic acid
  C-term amino
FDAXDDAEFVXFWQ

SEQ ID NO: 18 - protein, 14 aa, Artificial Sequence
  Description of Artificial Sequence: Synthetic peptide
  N-term Acetic Acid
  MOD_RES (4)..(4): (R)-2-amino-2-methyldec-9-enoic acid
  MOD_RES (8)..(8): (S)-2-aminohexanedioic acid
  MOD_RES (11)..(11): (S)-1-((allyloxy)carbonyl)-3-aminopyrrolidine-3-carboxylic acid
  C-term amino
FDAXDDAXFVXFWQ

SEQ ID NO: 19 - protein, 14 aa, Artificial Sequence
  Description of Artificial Sequence: Synthetic peptide
  N-term Acetic Acid
  MOD_RES (4)..(4): (R)-2-amino-2-methylhept-6-enoic acid
  MOD_RES (11)..(11): (S)-5-(((allyloxy)carbonyl)(methyl)amino)-2-amino-2- methylpentanoic acid
  C-term amino
FDAXDDAAFVXFWQ

SEQ ID NO: 20 - protein, 14 aa, Artificial Sequence
  Description of Artificial Sequence: Synthetic peptide
  N-term Acetic Acid
  MOD_RES (4)..(4): (R)-2-amino-2-methyloct-7-enoic acid
  MOD_RES (11)..(11): (S)-5-(((allyloxy)carbonyl)(methyl)amino)-2-amino-2- methylpentanoic acid
  C-term amino
FDAXDDAAFVXFWQ

SEQ ID NO: 21 - protein, 14 aa, Artificial Sequence
  Description of Artificial Sequence: Synthetic peptide
  N-term Acetic Acid
  MOD_RES (4)..(4): (R)-5-(((allyloxy)carbonyl)(methyl)amino)-2-amino-2- methylpentanoic acid
  MOD_RES (11)..(11): (S)-2-amino-2-methylhept-6-enoic acid
  C-term amino
FDAXDDAAFVXFWQ

SEQ ID NO: 22 - protein, 14 aa, Artificial Sequence
  Description of Artificial Sequence: Synthetic peptide
  N-term Acetic Acid
  MOD_RES (4)..(4): (R)-5-(((allyloxy)carbonyl)(methyl)amino)-2-amino-2- methylpentanoic acid
  MOD_RES (11)..(11): (S)-2-amino-2-methyloct-7-enoic acid
  C-term amino
FDAXDDAAFVXFWQ

SEQ ID NO: 23 - protein, 14 aa, Artificial Sequence
  Description of Artificial Sequence: Synthetic peptide
  N-term Acetic Acid
  MOD_RES (4)..(4): (R)-2-amino-2-methylnon-8-enoic acid
  MOD_RES (11)..(11): (S)-1-((allyloxy)carbonyl)-3-aminopyrrolidine-3-carboxylic acid
  C-term amino
FDAXDDAAFVXFWQ

SEQ ID NO: 24 - protein, 14 aa, Artificial Sequence
  Description of Artificial Sequence: Synthetic peptide
  N-term Acetic Acid
  MOD_RES (4)..(4): 1-((allyloxy)carbonyl)-3-aminoazetidine-3-carboxylic acid
  MOD_RES (11)..(11): (S)-2-amino-2-methylnon-8-enoic acid
  C-term amino
FDAXDDAAFVXFWQ

SEQ ID NO: 25 - protein, 14 aa, Artificial Sequence
  Description of Artificial Sequence: Synthetic peptide
  N-term Acetic Acid
  MOD_RES (4)..(4): (R)-2-amino-2-methyldec-9-enoic acid
  MOD_RES (11)..(11): (S)-3-(((allyloxy)carbonyl)(methyl)amino)-2-amino-2- methylpropanoic acid
  C-term amino
FDAXDDAAFVXFWQ

SEQ ID NO: 26 - protein, 14 aa, Artificial Sequence
  Description of Artificial Sequence: Synthetic peptide
  N-term Acetic Acid
  MOD_RES (4)..(4): 1-((allyloxy)carbonyl)-3-aminoazetidine-3-carboxylic acid
  MOD_RES (11)..(11): (S)-2-amino-2-methyldec-9-enoic acid
  C-term amino
FDAXDDAAFVXFWQ

SEQ ID NO: 27 - protein, 14 aa, Artificial Sequence
  Description of Artificial Sequence: Synthetic peptide
  N-term Acetic Acid
  MOD_RES (4)..(4): (R)-2-amino-2-methylhex-5-enoic acid
  MOD_RES (11)..(11): (S)-5-(((allyloxy)carbonyl)(methyl)amino)-2-amino-2- methylpentanoic acid
  C-term amino
FDAXDDAAFVXFWQ

SEQ ID NO: 28 - protein, 14 aa, Artificial Sequence
  Description of Artificial Sequence: Synthetic peptide
  N-term Acetic Acid
  MOD_RES (4)..(4): (R)-2-amino-2-methylhept-6-enoic acid
  MOD_RES (11)..(11): (S)-4-(((allyloxy)carbonyl)(methyl)amino)-2-amino-2- methylbutanoic acid
  C-term amino
FDAXDDAAFVXFWQ

SEQ ID NO: 29 - protein, 14 aa, Artificial Sequence
  Description of Artificial Sequence: Synthetic peptide
  N-term Acetic Acid
  MOD_RES (4)..(4): (R)-2-amino-2-methylnon-8-enoic acid
  MOD_RES (11)..(11): 1-((allyloxy)carbonyl)-3-aminoazetidine-3-carboxylic acid
  C-term amino
FDAXDDAAFVXFWQ

SEQ ID NO: 30 - protein, 14 aa, Artificial Sequence
  Description of Artificial Sequence: Synthetic peptide
  N-term Acetic Acid
  MOD_RES (4)..(4): (R)-2-amino-2-methyldec-9-enoic acid
  MOD_RES (11)..(11): 1-((allyloxy)carbonyl)-3-aminoazetidine-3-carboxylic acid
  C-term amino
FDAXDDAAFVXFWQ

SEQ ID NO: 31 - protein, 14 aa, Artificial Sequence
  Description of Artificial Sequence: Synthetic peptide
  N-term Acetic Acid
  MOD_RES (4)..(4): (R)-4-(((allyloxy)carbonyl)(methyl)amino)-2-amino-2- methylbutanoic acid
  MOD_RES (11)..(11): (S)-2-amino-2-methylhex-5-enoic acid
  C-term amino
FDAXDDAAFVXFWQ

SEQ ID NO: 32 - protein, 14 aa, Artificial Sequence
  Description of Artificial Sequence: Synthetic peptide
  N-term Acetic Acid
  MOD_RES (4)..(4): (R)-3-(((allyloxy)carbonyl)(methyl)amino)-2-amino-2- methylpropanoic acid
  MOD_RES (11)..(11): (S)-2-amino-2-methyldec-9-enoic acid
  C-term amino
FDAXDDAAFVXFWQ

SEQ ID NO: 33 - protein, 14 aa, Artificial Sequence
  Description of Artificial Sequence: Synthetic peptide
  N-term Acetic Acid
  MOD_RES (4)..(4): (R)-3-(((allyloxy)carbonyl)(methyl)amino)-2-amino-2- methylpropanoic acid
  MOD_RES (11)..(11): (S)-2-amino-2-methylnon-8-enoic acid
  C-term amino
FDAXDDAAFVXFWQ

SEQ ID NO: 34 - protein, 14 aa, Artificial Sequence
  Description of Artificial Sequence: Synthetic peptide
  N-term Acetic Acid
  MOD_RES (3)..(3): (R)-2-amino-2-methyldec-9-enoic acid
  MOD_RES (10)..(10): (S)-2-amino-2-methylhept-6-enoic acid
  C-term amino
FDXADDAAFXAFWQ

SEQ ID NO: 35 - protein, 14 aa, Artificial Sequence
  Description of Artificial Sequence: Synthetic peptide
  N-term Acetic Acid
  MOD_RES (3)..(3): (R)-4-(((allyloxy)carbonyl)(methyl)amino)-2-amino-2- methylbutanoic acid
  MOD_RES (10)..(10): (S)-2-amino-2-methylnon-8-enoic acid
  C-term amino
FDXADDAAFXAFWQ

SEQ ID NO: 36 - protein, 14 aa, Artificial Sequence
  Description of Artificial Sequence: Synthetic peptide
  N-term Acetic Acid
  MOD_RES (3)..(3): (R)-2-amino-2-methyldec-9-enoic acid
  MOD_RES (10)..(10): (S)-1-((allyloxy)carbonyl)-3-aminopyrrolidine-3-carboxylic acid
  C-term amino
FDXADDAAFXAFWQ

SEQ ID NO: 37 - protein, 14 aa, Artificial Sequence
  Description of Artificial Sequence: Synthetic peptide
  N-term Acetic Acid
  MOD_RES (1)..(1): (R)-2-allylpyrrolidine-2-carboxylic acid
  MOD_RES (4)..(4): 2-amino-2-(pent-4-en-1-yl)hept-6-enoic acid
  MOD_RES (11)..(11): (S)-2-amino-2-methyldec-9-enoic acid
  C-term amino
XDAXDDAAFVXFWQ

SEQ ID NO: 38 - protein, 14 aa, Artificial Sequence
  Description of Artificial Sequence: Synthetic peptide
  N-term Acetic Acid
  MOD_RES (1)..(1): (R)-2-allylpyrrolidine-2-carboxylic acid
  MOD_RES (4)..(4): 2-amino-2-(pent-4-en-1-yl)hept-6-enoic acid
  MOD_RES (11)..(11): (S)-5-(((allyloxy)carbonyl)(methyl)amino)-2-amino-2- methylpentanoic acid
  C-term amino
XDAXDDAAFVXFWQ

SEQ ID NO: 39 - protein, 14 aa, Artificial Sequence
  Description of Artificial Sequence: Synthetic peptide
  N-term Acetic Acid
  MOD_RES (1)..(1): (R)-2-allylpyrrolidine-2-carboxylic acid
  MOD_RES (4)..(4): 2-amino-2-(pent-4-en-1-yl)hept-6-enoic acid
  MOD_RES (11)..(11): (S)-4-(((allyloxy)carbonyl)(methyl)amino)-2-amino-2- methylbutanoic acid
  C-term amino
XDAXDDAAFVXFWQ

SEQ ID NO: 40 - protein, 14 aa, Artificial Sequence
  Description of Artificial Sequence: Synthetic peptide
  N-term Acetic Acid
  MOD_RES (4)..(4): (R)-2-amino-2-methyldec-9-enoic acid
  MOD_RES (6)..(6): (R)-2-amino-2-methyl-3-phenylpropanoic acid
  MOD_RES (11)..(11): (S)-1-((allyloxy)carbonyl)-3-aminopyrrolidine-3-carboxylic acid
  C-term amino
FDAXDFAAFVXFWQ

SEQ ID NO: 41 - protein, 14 aa, Artificial Sequence
  Description of Artificial Sequence: Synthetic peptide
  N-term Acetic Acid
  MOD_RES (4)..(4): (R)-2-amino-2-methyldec-9-enoic acid
  MOD_RES (11)..(11): (S)-1-((allyloxy)carbonyl)-3-aminopyrrolidine-3-carboxylic acid
  C-term amino
FDAXDQAAFVXFWQ

SEQ ID NO: 42 - protein, 14 aa, Artificial Sequence
  Description of Artificial Sequence: Synthetic peptide
  N-term Acetic Acid
  MOD_RES (4)..(4): (R)-2-amino-2-methyldec-9-enoic acid
  MOD_RES (11)..(11): (S)-1-((allyloxy)carbonyl)-3-aminopyrrolidine-3-carboxylic acid
  MOD_RES (12)..(12): (S)-2-amino-3-cyclohexylpropanoic acid
  C-term amino
FDAXDDAAFVXXWQ

SEQ ID NO: 43 - protein, 14 aa, Artificial Sequence
  Description of Artificial Sequence: Synthetic peptide
  N-term Acetic Acid
  MOD_RES (4)..(4): (R)-2-amino-2-methyldec-9-enoic acid
  MOD_RES (11)..(11): (S)-1-((allyloxy)carbonyl)-3-aminopyrrolidine-3-carboxylic acid
  C-term amino
FDAXDDAAFVXYWQ

SEQ ID NO: 44 - protein, 14 aa, Artificial Sequence
  Description of Artificial Sequence: Synthetic peptide
  N-term Acetic Acid
  MOD_RES (4)..(4): (R)-4-(((allyloxy)carbonyl)(methyl)amino)-2-amino-2- methylbutanoic acid
  MOD_RES (11)..(11): (S)-2-amino-2-methylnon-8-enoic acid
  C-term amino
ADIXDDAAFQXFWH

SEQ ID NO: 45 - protein, 14 aa, Artificial Sequence
  Description of Artificial Sequence: Synthetic peptide
  N-term Acetic Acid
  MOD_RES (4)..(4): (R)-4-(((allyloxy)carbonyl)(methyl)amino)-2-amino-2- methylbutanoic acid
  MOD_RES (11)..(11): (S)-2-amino-2-methylnon-8-enoic acid
  C-term amino
ADIXDEAAFQXFWH

SEQ ID NO: 46 - protein, 14 aa, Artificial Sequence
  Description of Artificial Sequence: Synthetic peptide
  N-term Acetic Acid
  MOD_RES (4)..(4): (R)-4-(((allyloxy)carbonyl)(methyl)amino)-2-amino-2- methylbutanoic acid
  MOD_RES (6)..(6): (S)-2-aminohexanoic acid
  MOD_RES (11)..(11): (S)-2-amino-2-methylnon-8-enoic acid
  C-term amino
ADIXDXAAFQXFWH

SEQ ID NO: 47 - protein, 14 aa, Artificial Sequence
  Description of Artificial Sequence: Synthetic peptide
  N-term Acetic Acid
  MOD_RES (4)..(4): (R)-4-(((allyloxy)carbonyl)(methyl)amino)-2-amino-2- methylbutanoic acid
  MOD_RES (6)..(6): (S)-2-amino-5-methylhexanoic acid
  MOD_RES (11)..(11): (S)-2-amino-2-methylnon-8-enoic acid
  C-term amino
ADIXDXAAFQXFWH

SEQ ID NO: 48 - protein, 14 aa, Artificial Sequence
  Description of Artificial Sequence: Synthetic peptide
  N-term Acetic Acid
  MOD_RES (4)..(4): (R)-4-(((allyloxy)carbonyl)(methyl)amino)-2-amino-2- methylbutanoic acid
  MOD_RES (6)..(6): (S)-2-amino-3-cyclohexylpropanoic acid
  MOD_RES (11)..(11): (S)-2-amino-2-methylnon-8-enoic acid
  C-term amino
ADIXDXAAFQXFWH

SEQ ID NO: 49 - protein, 14 aa, Artificial Sequence
  Description of Artificial Sequence: Synthetic peptide
  N-term Acetic Acid
  MOD_RES (4)..(4): (R)-2-amino-2-methyldec-9-enoic acid
  MOD_RES (9)..(9): (S)-2-amino-3-cyclohexylpropanoic acid
  MOD_RES (11)..(11): (S)-1-((allyloxy)carbonyl)-3-aminopyrrolidine-3-carboxylic acid
  C-term amino
FDAXDDAAXVXFWQ

SEQ ID NO: 50 - protein, 14 aa, Artificial Sequence
  Description of Artificial Sequence: Synthetic peptide
  N-term Acetic Acid
  MOD_RES (4)..(4): (R)-2-amino-2-methyldec-9-enoic acid
  MOD_RES (9)..(9): (S)-2-aminohexanoic acid
  MOD_RES (11)..(11): (S)-1-((allyloxy)carbonyl)-3-aminopyrrolidine-3-carboxylic acid
  C-term amino
FDAXDDAAXVXFWQ

SEQ ID NO: 51 - protein, 14 aa, Artificial Sequence
  Description of Artificial Sequence: Synthetic peptide
  N-term Acetic Acid
  MOD_RES (4)..(4): (R)-2-amino-2-methyldec-9-enoic acid
  MOD_RES (9)..(9): (S)-2-amino-3-(3-fluorophenyl)propanoic acid
  MOD_RES (11)..(11): (S)-1-((allyloxy)carbonyl)-3-aminopyrrolidine-3-carboxylic acid
  C-term amino
FDAXDDAAFVXFWQ

SEQ ID NO: 52 - protein, 14 aa, Artificial Sequence
  Description of Artificial Sequence: Synthetic peptide
  N-term Acetic Acid
  MOD_RES (4)..(4): (R)-2-amino-2-methyldec-9-enoic acid
  MOD_RES (9)..(9): (S)-2-amino-3-(4-fluorophenyl)propanoic acid
  MOD_RES (11)..(11): (S)-1-((allyloxy)carbonyl)-3-aminopyrrolidine-3-carboxylic acid
  C-term amino
FDAXDDAAFVXFWQ

SEQ ID NO: 53 - protein, 14 aa, Artificial Sequence
  Description of Artificial Sequence: Synthetic peptide
  N-term Acetic Acid
  MOD_RES (4)..(4): (R)-2-amino-2-methyldec-9-enoic acid
  MOD_RES (9)..(9): (S)-2-amino-3-(3,4-difluorophenyl)propanoic acid
  MOD_RES (11)..(11): (S)-1-((allyloxy)carbonyl)-3-aminopyrrolidine-3-carboxylic acid
  C-term amino
FDAXDDAAFVXFWQ

SEQ ID NO: 54 - protein, 14 aa, Artificial Sequence
  Description of Artificial Sequence: Synthetic peptide
  N-term Acetic Acid
  MOD_RES (4)..(4): (R)-2-amino-2-methyldec-9-enoic acid
  MOD_RES (11)..(11): (S)-1-((allyloxy)carbonyl)-3-aminopyrrolidine-3-carboxylic acid
  MOD_RES (12)..(12): (S)-2-amino-3-(pyridin-2-yl)propanoic acid
  C-term amino
FDAXDDAAFVXXWQ

SEQ ID NO: 55 - protein, 14 aa, Artificial Sequence
  Description of Artificial Sequence: Synthetic peptide
  N-term Acetic Acid
  MOD_RES (4)..(4): (R)-2-amino-2-methyldec-9-enoic acid
  MOD_RES (11)..(11): (S)-1-((allyloxy)carbonyl)-3-aminopyrrolidine-3-carboxylic acid
  MOD_RES (12)..(12): (S)-2-amino-3-(pyridin-3-yl)propanoic acid
  C-term amino
FDAXDDAAFVXXWQ

SEQ ID NO: 56 - protein, 14 aa, Artificial Sequence
  Description of Artificial Sequence: Synthetic peptide
  N-term Acetic Acid
  MOD_RES (4)..(4): (R)-2-amino-2-methyldec-9-enoic acid
  MOD_RES (11)..(11): (S)-1-((allyloxy)carbonyl)-3-aminopyrrolidine-3-carboxylic acid
  MOD_RES (12)..(12): (S)-2-amino-3-(pyridin-4-yl)propanoic acid
  C-term amino
FDAXDDAAFVXXWQ

SEQ ID NO: 57 - protein, 14 aa, Artificial Sequence
  Description of Artificial Sequence: Synthetic peptide
  N-term Acetic Acid
  MOD_RES (4)..(4): (R)-2-amino-2-methyldec-9-enoic acid
  MOD_RES (9)..(9): (S)-2-amino-3-(pyridin-2-yl)propanoic acid
  MOD_RES (11)..(11): (S)-1-((allyloxy)carbonyl)-3-aminopyrrolidine-3-carboxylic acid
  C-term amino
FDAXDDAAXVXFWQ

SEQ ID NO: 58 - protein, 14 aa, Artificial Sequence
  Description of Artificial Sequence: Synthetic peptide
  N-term Acetic Acid
  MOD_RES (4)..(4): (R)-2-amino-2-methyldec-9-enoic acid
  MOD_RES (9)..(9): (S)-2-amino-3-(pyridin-3-yl)propanoic acid
  MOD_RES (11)..(11): (S)-1-((allyloxy)carbonyl)-3-aminopyrrolidine-3-carboxylic acid
  C-term amino
FDAXDDAAXVXFWQ

SEQ ID NO: 59 - protein, 14 aa, Artificial Sequence
  Description of Artificial Sequence: Synthetic peptide
  N-term Acetic Acid
  MOD_RES (4)..(4): (R)-2-amino-2-methyldec-9-enoic acid
  MOD_RES (11)..(11): (S)-1-((allyloxy)carbonyl)-3-aminopyrrolidine-3-carboxylic acid
  MOD_RES (12)..(12): (S)-2-amino-3-(4-carbamoylphenyl)propanoic acid
  C-term amino
FDAXDDAAFVXFWQ

SEQ ID NO: 60 - protein, 14 aa, Artificial Sequence
  Description of Artificial Sequence: Synthetic peptide
  N-term Acetic Acid
  MOD_RES (4)..(4): (R)-2-amino-2-methyldec-9-enoic acid
  MOD_RES (9)..(9): (S)-2-amino-3-(4-carbamoylphenyl)propanoic acid
  MOD_RES (11)..(11): (S)-1-((allyloxy)carbonyl)-3-aminopyrrolidine-3-carboxylic acid
  C-term amino
FDAXDDAAFVXFWQ

SEQ ID NO: 61 - protein, 14 aa, Artificial Sequence
  Description of Artificial Sequence: Synthetic peptide
  N-term Acetic Acid
  MOD_RES (4)..(4): (R)-2-amino-2-methyldec-9-enoic acid
  MOD_RES (11)..(11): (S)-1-((allyloxy)carbonyl)-3-aminopyrrolidine-3-carboxylic acid
  MOD_RES (12)..(12): (S)-2-amino-3-cyclopentylpropanoic acid
  C-term amino
FDAXDDAAFVXXWQ

SEQ ID NO: 62 - protein, 14 aa, Artificial Sequence
  Description of Artificial Sequence: Synthetic peptide
  N-term Acetic Acid
  MOD_RES (4)..(4): (R)-2-amino-2-methyldec-9-enoic acid
  MOD_RES (9)..(9): (S)-2-amino-3-cyclopentylpropanoic acid
  MOD_RES (11)..(11): (S)-1-((allyloxy)carbonyl)-3-aminopyrrolidine-3-carboxylic acid
  C-term amino
FDAXDDAAXVXFWQ

SEQ ID NO: 63 - protein, 14 aa, Artificial Sequence
  Description of Artificial Sequence: Synthetic peptide
  N-term Acetic Acid
  MOD_RES (4)..(4): (R)-2-amino-2-methyldec-9-enoic acid
  MOD_RES (6)..(6): (S)-2-amino-4-phenylbutanoic acid
  MOD_RES (11)..(11): (S)-1-((allyloxy)carbonyl)-3-aminopyrrolidine-3-carboxylic acid
  C-term amino
FDAXDXAAFVXFWQ

SEQ ID NO: 64 - protein, 14 aa, Artificial Sequence
  Description of Artificial Sequence: Synthetic peptide
  N-term Acetic Acid
  MOD_RES (4)..(4): (R)-2-amino-2-methyldec-9-enoic acid
  MOD_RES (11)..(11): (S)-1-((allyloxy)carbonyl)-3-aminopyrrolidine-3-carboxylic acid
  C-term amino
FDAXDFAAFVXFWQ

SEQ ID NO: 65 - protein, 14 aa, Artificial Sequence
  Description of Artificial Sequence: Synthetic peptide
  N-term Acetic Acid
  MOD_RES (4)..(4): (R)-2-amino-2-methyldec-9-enoic acid
  MOD_RES (11)..(11): (S)-1-((allyloxy)carbonyl)-3-aminopyrrolidine-3-carboxylic acid
  MOD_RES (12)..(12): (S)-2-amino-3-(3-methoxyphenyl)propanoic acid
  C-term amino
FDAXDDAAFVXFWQ

SEQ ID NO: 66 - protein, 14 aa, Artificial Sequence
  Description of Artificial Sequence: Synthetic peptide
  N-term Acetic Acid
  MOD_RES (4)..(4): (R)-2-amino-2-methyldec-9-enoic acid
  MOD_RES (9)..(9): (S)-2-amino-3-(3-methoxyphenyl)propanoic acid
  MOD_RES (11)..(11): (S)-1-((allyloxy)carbonyl)-3-aminopyrrolidine-3-carboxylic acid
  C-term amino
FDAXDDAAFVXFWQ

SEQ ID NO: 67 - protein, 14 aa, Artificial Sequence
  Description of Artificial Sequence: Synthetic peptide
  N-term Acetic Acid
  MOD_RES (4)..(4): (R)-2-amino-2-methyldec-9-enoic acid
  MOD_RES (11)..(11): (S)-1-((allyloxy)carbonyl)-3-aminopyrrolidine-3-carboxylic acid
  MOD_RES (12)..(12): (S)-2-amino-3-(2-carbamoylphenyl)propanoic acid
  C-term amino
FDAXDDAAFVXFWQ

SEQ ID NO: 68 - protein, 14 aa, Artificial Sequence
  Description of Artificial Sequence: Synthetic peptide
  N-term Acetic Acid
  MOD_RES (4)..(4): (R)-2-amino-2-methyldec-9-enoic acid
  MOD_RES (11)..(11): (S)-1-((allyloxy)carbonyl)-3-aminopyrrolidine-3-carboxylic acid
  MOD_RES (12)..(12): (S)-2-amino-3-(3-carbamoylphenyl)propanoic acid
  C-term amino
FDAXDDAAFVXFWQ

SEQ ID NO: 69 - protein, 14 aa, Artificial Sequence
  Description of Artificial Sequence: Synthetic peptide
  N-term Acetic Acid
  MOD_RES (4)..(4): (R)-2-amino-2-methyldec-9-enoic acid
  MOD_RES (9)..(9): (S)-2-amino-3-(3-carbamoylphenyl)propanoic acid
  MOD_RES (11)..(11): (S)-1-((allyloxy)carbonyl)-3-aminopyrrolidine-3-carboxylic acid
  C-term amino
FDAXDDAAFVXFWQ

SEQ ID NO: 70 - protein, 14 aa, Artificial Sequence
  Description of Artificial Sequence: Synthetic peptide
  N-term Acetic Acid
  MOD_RES (4)..(4): (R)-2-amino-2-methyldec-9-enoic acid
  MOD_RES (11)..(11): (S)-1-((allyloxy)carbonyl)-3-aminopyrrolidine-3-carboxylic acid
  MOD_RES (12)..(12): (S)-4-(2-amino-2-carboxyethyl)benzoic acid
  C-term amino
FDAXDDAAFVXXWQ

SEQ ID NO: 71 - protein, 14 aa, Artificial Sequence
  Description of Artificial Sequence: Synthetic peptide
  N-term Acetic Acid
  MOD_RES (4)..(4): (R)-2-amino-2-methyldec-9-enoic acid
  MOD_RES (9)..(9): (S)-2-amino-3-(naphthalen-2-yl)propanoic acid
  MOD_RES (11)..(11): (S)-1-((allyloxy)carbonyl)-3-aminopyrrolidine-3-carboxylic acid
  C-term amino
FDAXDDAAXVXFWQ

SEQ ID NO: 72 - protein, 14 aa, Artificial Sequence
  Description of Artificial Sequence: Synthetic peptide
  N-term Acetic Acid
  MOD_RES (4)..(4): (R)-2-amino-2-methyldec-9-enoic acid
  MOD_RES (6)..(6): (S)-2-amino-3-(naphthalen-1-yl)propanoic acid
  MOD_RES (11)..(11): (S)-1-((allyloxy)carbonyl)-3-aminopyrrolidine-3-carboxylic acid
  C-term amino
FDAXDXAAFVXFWQ

SEQ ID NO: 73 - protein, 14 aa, Artificial Sequence
  Description of Artificial Sequence: Synthetic peptide
  N-term Acetic Acid
  MOD_RES (4)..(4): (R)-2-amino-2-methyldec-9-enoic acid
  MOD_RES (6)..(6): (S)-2-amino-3-(naphthalen-2-yl)propanoic acid
  MOD_RES (11)..(11): (S)-1-((allyloxy)carbonyl)-3-aminopyrrolidine-3-carboxylic acid
  C-term amino
FDAXDXAAFVXFWQ

SEQ ID NO: 74 - protein, 14 aa, Artificial Sequence
  Description of Artificial Sequence: Synthetic peptide
  N-term Acetic Acid
  MOD_RES (4)..(4): (R)-2-amino-2-methyldec-9-enoic acid
  MOD_RES (9)..(9): (S)-2-amino-4-phenylbutanoic acid
  MOD_RES (11)..(11): (S)-1-((allyloxy)carbonyl)-3-aminopyrrolidine-3-carboxylic acid
  C-term amino
FDAXDDAAXVXFWQ

SEQ ID NO: 75 - protein, 14 aa, Artificial Sequence
  Description of Artificial Sequence: Synthetic peptide
  N-term Acetic Acid
  MOD_RES (4)..(4): (R)-2-amino-2-methyldec-9-enoic acid
  MOD_RES (9)..(9): (S)-2-amino-4-(4-hydroxyphenyl)butanoic acid
  MOD_RES (11)..(11): (S)-1-((allyloxy)carbonyl)-3-aminopyrrolidine-3-carboxylic acid
  C-term amino
FDAXDDAAXVXFWQ

SEQ ID NO: 76 - protein, 14 aa, Artificial Sequence
  Description of Artificial Sequence: Synthetic peptide
  N-term Acetic Acid
  MOD_RES (4)..(4): (R)-2-amino-2-methyldec-9-enoic acid
  MOD_RES (11)..(11): (S)-1-((allyloxy)carbonyl)-3-aminopyrrolidine-3-carboxylic acid
  C-term amino
FDAXDDAAFVXDWQ

SEQ ID NO: 77 - protein, 14 aa, Artificial Sequence
  Description of Artificial Sequence: Synthetic peptide
  N-term Acetic Acid
  MOD_RES (1)..(1): (R)-2-allylpyrrolidine-2-carboxylic acid
  MOD_RES (4)..(4): 2-amino-2-(pent-4-en-1-yl)hept-6-enoic acid
  MOD_RES (11)..(11): (S)-2-amino-2-methyldec-9-enoic acid
  C-term amino
XDAXDEAAFVXFWQ

SEQ ID NO: 78 - protein, 14 aa, Artificial Sequence
  Description of Artificial Sequence: Synthetic peptide
  N-term Acetic Acid
  MOD_RES (1)..(1): (R)-2-allylpyrrolidine-2-carboxylic acid
  MOD_RES (4)..(4): 2-amino-2-(pent-4-en-1-yl)hept-6-enoic acid
  MOD_RES (11)..(11): (S)-2-amino-2-methyldec-9-enoic acid
  C-term amino
XDAXDNAAFVXFWQ

SEQ ID NO: 79 - protein, 14 aa, Artificial Sequence
  Description of Artificial Sequence: Synthetic peptide
  N-term Acetic Acid
  MOD_RES (1)..(1): (R)-2-allylpyrrolidine-2-carboxylic acid
  MOD_RES (4)..(4): 2-amino-2-(pent-4-en-1-yl)hept-6-enoic acid
  MOD_RES (11)..(11): (S)-2-amino-2-methyldec-9-enoic acid
  C-term amino
XDAXDQAAFVXFWQ

SEQ ID NO: 80 - protein, 13 aa, Artificial Sequence
  Description of Artificial Sequence: Synthetic peptide
  N-term Acetic Acid
  MOD_RES (1)..(1): (R)-2-allylpyrrolidine-2-carboxylic acid
  MOD_RES (4)..(4): 2-amino-2-(pent-4-en-1-yl)hept-6-enoic acid
  MOD_RES (11)..(11): (S)-2-amino-2-methyldec-9-enoic acid
  C-term amino
XDAXDEAAFVXFW

SEQ ID NO: 81 - protein, 14 aa, Artificial Sequence
  Description of Artificial Sequence: Synthetic peptide
  N-term Acetic Acid
  MOD_RES (1)..(1): (R)-2-allylpyrrolidine-2-carboxylic acid
  MOD_RES (4)..(4): 2-amino-2-(pent-4-en-1-yl)hept-6-enoic acid
  MOD_RES (6)..(6): (S)-2-aminohexanedioic acid
  MOD_RES (11)..(11): (S)-2-amino-2-methyldec-9-enoic acid
  C-term amino
XDAXDXAAFVXFWQ

SEQ ID NO: 82 - protein, 14 aa, Artificial Sequence
  Description of Artificial Sequence: Synthetic peptide
  N-term Acetic Acid
  MOD_RES (1)..(1): (R)-2-allylpyrrolidine-2-carboxylic acid
  MOD_RES (4)..(4): 2-amino-2-(pent-4-en-1-yl)hept-6-enoic acid
  MOD_RES (11)..(11): (S)-5-(((allyloxy)carbonyl)(methyl)amino)-2-amino-2- methylpentanoic acid
  C-term amino
XDAXDEAAFVXFWQ

SEQ ID NO: 83 - protein, 14 aa, Artificial Sequence
  Description of Artificial Sequence: Synthetic peptide
  N-term Acetic Acid
  MOD_RES (1)..(1): (R)-2-allylpyrrolidine-2-carboxylic acid
  MOD_RES (4)..(4): 2-amino-2-(pent-4-en-1-yl)hept-6-enoic acid
  MOD_RES (11)..(11): (S)-2-amino-2-methylnon-8-enoic acid
  C-term amino
XDAXDEAAFVXFWQ

SEQ ID NO: 84 - protein, 14 aa, Artificial Sequence
  Description of Artificial Sequence: Synthetic peptide
  N-term Acetic Acid
  MOD_RES (1)..(1): (R)-2-allylpyrrolidine-2-carboxylic acid
  MOD_RES (4)..(4): 2-amino-2-(pent-4-en-1-yl)hept-6-enoic acid
  MOD_RES (11)..(11): (S)-2-amino-2-methyldec-9-enoic acid
  MOD_RES (14)..(14): 2-amino-2-methylpropanoic acid
  C-term amino
XDAXDEAAFVXFWX

SEQ ID NO: 85 - protein, 14 aa, Artificial Sequence
  Description of Artificial Sequence: Synthetic peptide
  N-term Acetic Acid
  MOD_RES (1)..(1): (R)-2-allylpyrrolidine-2-carboxylic acid
  MOD_RES (4)..(4): 2-amino-2-(pent-4-en-1-yl)hept-6-enoic acid
  MOD_RES (11)..(11): (S)-2-amino-2-methyldec-9-enoic acid
  C-term amino
XDAXDEAAFVXFWA

SEQ ID NO: 86 - protein, 14 aa, Artificial Sequence
  Description of Artificial Sequence: Synthetic peptide
  N-term Acetic Acid
  MOD_RES (1)..(1): (R)-2-allylpyrrolidine-2-carboxylic acid
  MOD_RES (4)..(4): 2-amino-2-(pent-4-en-1-yl)hept-6-enoic acid
  MOD_RES (11)..(11): (S)-2-amino-2-methyldec-9-enoic acid
  MOD_RES (13)..(13): (S)-2-amino-3-(1H-indol-3-yl)-2-methylpropanoic acid
  C-term amino
XDAXDEAAFVXFXQ

SEQ ID NO: 87 - protein, 14 aa, Artificial Sequence
  Description of Artificial Sequence: Synthetic peptide
  N-term Acetic Acid
  MOD_RES (1)..(1): (R)-2-allylpyrrolidine-2-carboxylic acid
  MOD_RES (4)..(4): 2-amino-2-(pent-4-en-1-yl)hept-6-enoic acid
  MOD_RES (6)..(6): (S)-2-aminohexanoic acid
  MOD_RES (11)..(11): (S)-2-amino-2-methyldec-9-enoic acid
  C-term amino
XDAXDXAAFVXFWQ

SEQ ID NO: 88 - protein, 14 aa, Artificial Sequence
  Description of Artificial Sequence: Synthetic peptide
  N-term Acetic Acid
  MOD_RES (1)..(1): (R)-2-allylpyrrolidine-2-carboxylic acid
  MOD_RES (4)..(4): 2-amino-2-(pent-4-en-1-yl)hept-6-enoic acid
  MOD_RES (11)..(11): (S)-2-amino-2-methyldec-9-enoic acid
  MOD_RES (13)..(13): (S)-2-amino-3-(naphthalen-2-yl)propanoic acid
  C-term amino
XDAXDEAAFVXFXQ

SEQ ID NO: 89 - protein, 13 aa, Artificial Sequence
  Description of Artificial Sequence: Synthetic peptide
  N-term Acetic Acid
  MOD_RES (1)..(1): (R)-2-allylpyrrolidine-2-carboxylic acid
  MOD_RES (4)..(4): 2-amino-2-(pent-4-en-1-yl)hept-6-enoic acid
  MOD_RES (11)..(11): (S)-2-amino-2-methyldec-9-enoic acid
  MOD_RES (13)..(13): (S)-2-amino-3-(naphthalen-2-yl)propanoic acid
  C-term amino
XDAXDEAAFVXFX

SEQ ID NO: 90 - protein, 14 aa, Artificial Sequence
  Description of Artificial Sequence: Synthetic peptide
  N-term Acetic Acid
  MOD_RES (1)..(1): (R)-2-allylpyrrolidine-2-carboxylic acid
  MOD_RES (4)..(4): 2-amino-2-(pent-4-en-1-yl)hept-6-enoic acid
  MOD_RES (11)..(11): (S)-2-amino-2-methyldec-9-enoic acid
  MOD_RES (13)..(13): 2-amino-3-(6-fluoronaphthalen-1-yl)propanoic acid
  C-term amino
XDAXDEAAFVXFXQ

SEQ ID NO: 91 - protein, 14 aa, Artificial Sequence
  Description of Artificial Sequence: Synthetic peptide
  N-term Acetic Acid
  MOD_RES (1)..(1): (R)-2-allylpyrrolidine-2-carboxylic acid
  MOD_RES (4)..(4): 2-amino-2-(pent-4-en-1-yl)hept-6-enoic acid
  MOD_RES (11)..(11): (S)-2-amino-2-methyldec-9-enoic acid
  MOD_RES (13)..(13): (S)-2-amino-3-(quinolin-2-yl)propanoic acid
  C-term amino
XDAXDEAAFVXFXQ

SEQ ID NO: 92 - protein, 14 aa, Artificial Sequence
  Description of Artificial Sequence: Synthetic peptide
  N-term Acetic Acid
  MOD_RES (1)..(1): (R)-2-allylpyrrolidine-2-carboxylic acid
  MOD_RES (4)..(4): 2-amino-2-(pent-4-en-1-yl)hept-6-enoic acid
  MOD_RES (11)..(11): (S)-2-amino-2-methyldec-9-enoic acid
  MOD_RES (13)..(13): (S)-2-amino-3-(benzo[b]thiophen-3-yl)propanoic acid
  C-term amino
XDAXDEAAFVXFXQ

SEQ ID NO: 93 - protein, 14 aa, Artificial Sequence
  Description of Artificial Sequence: Synthetic peptide
  N-term Acetic Acid
  MOD_RES (1)..(1): (R)-2-allylpyrrolidine-2-carboxylic acid
  MOD_RES (4)..(4): 2-amino-2-(pent-4-en-1-yl)hept-6-enoic acid
  MOD_RES (11)..(11): (S)-2-amino-2-methyldec-9-enoic acid
  MOD_RES (13)..(13): (S)-3-([1,1'-biphenyl]-4-yl)-2-aminopropanoic acid
  C-term amino
XDAXDEAAFVXFXQ

SEQ ID NO: 94 - protein, 14 aa, Artificial Sequence
  Description of Artificial Sequence: Synthetic peptide
  N-term Acetic Acid
  MOD_RES (1)..(1): (R)-2-allylpyrrolidine-2-carboxylic acid
  MOD_RES (4)..(4): 2-amino-2-(pent-4-en-1-yl)hept-6-enoic acid
  MOD_RES (11)..(11): (S)-2-amino-2-methyldec-9-enoic acid
  MOD_RES (13)..(13): (S)-2-amino-3-(5-fluoro-1H-indol-3-yl)propanoic acid
  C-term amino
XDAXDEAAFVXFXQ

SEQ ID NO: 95 - protein, 13 aa, Artificial Sequence
  Description of Artificial Sequence: Synthetic peptide
  N-term Acetic Acid
  MOD_RES (1)..(1): 2-amino-2-methylpropanoic acid
  MOD_RES (4)..(4): (R)-4-(((allyloxy)carbonyl)(methyl)amino)-2-amino-2- methylbutanoic acid
  MOD_RES (11)..(11): (S)-2-amino-2-methylnon-8-enoic acid
  C-term amino
XDIXDEAAFQXFW

SEQ ID NO: 96 - protein, 13 aa, Artificial Sequence
  Description of Artificial Sequence: Synthetic peptide
  N-term Acetic Acid
  MOD_RES (4)..(4): (R)-4-(((allyloxy)carbonyl)(methyl)amino)-2-amino-2- methylbutanoic acid
  MOD_RES (11)..(11): (S)-2-amino-2-methylnon-8-enoic acid
  C-term amino
ADIXDEAAFQXFW

SEQ ID NO: 97 - protein, 13 aa, Artificial Sequence
  Description of Artificial Sequence: Synthetic peptide
  N-term Acetic Acid
  MOD_RES (3)..(3): (R)-4-(((allyloxy)carbonyl)(methyl)amino)-2-amino-2- methylbutanoic acid
  MOD_RES (10)..(10): (S)-2-amino-2-methylnon-8-enoic acid
  C-term amino
DIXDDAAFQXFWH

SEQ ID NO: 98 - protein, 12 aa, Artificial Sequence
  Description of Artificial Sequence: Synthetic peptide
  N-term Acetic Acid
  MOD_RES (3)..(3): (R)-4-(((allyloxy)carbonyl)(methyl)amino)-2-amino-2- methylbutanoic acid
  MOD_RES (10)..(10): (S)-2-amino-2-methylnon-8-enoic acid
  C-term amino
DIXDDAAFQXFW

SEQ ID NO: 99 - protein, 14 aa, Artificial Sequence
  Description of Artificial Sequence: Synthetic peptide
  N-term Acetic Acid
  MOD_RES (4)..(4): (R)-4-(((allyloxy)carbonyl)(methyl)amino)-2-amino-2- methylbutanoic acid
  MOD_RES (11)..(11): (S)-2-amino-2-methylnon-8-enoic acid
  C-term amino
ADIXDEAAFAXFWH

SEQ ID NO: 100 - protein, 14 aa, Artificial Sequence
  Description of Artificial Sequence: Synthetic peptide
  N-term Acetic Acid
  MOD_RES (4)..(4): (R)-4-(((allyloxy)carbonyl)(methyl)amino)-2-amino-2- methylbutanoic acid
  MOD_RES (11)..(11): (S)-2-amino-2-methylnon-8-enoic acid
  C-term amino
ADIXDEAAFQXFWA

SEQ ID NO: 101 - protein, 14 aa, Artificial Sequence
  Description of Artificial Sequence: Synthetic peptide
  N-term Acetic Acid
  MOD_RES (4)..(4): (R)-4-(((allyloxy)carbonyl)(methyl)amino)-2-amino-2- methylbutanoic acid
  MOD_RES (11)..(11): (S)-2-amino-2-methylnon-8-enoic acid
  C-term amino
ADIXDEAAFAXFWA

SEQ ID NO: 102 - protein, 14 aa, Artificial Sequence
  Description of Artificial Sequence: Synthetic peptide
  N-term Acetic Acid
  MOD_RES (4)..(4): (R)-4-(((allyloxy)carbonyl)(methyl)amino)-2-amino-2- methylbutanoic acid
  MOD_RES (11)..(11): (S)-2-amino-2-methylnon-8-enoic acid
  C-term amino
ADAXDEAAFQXFWH

SEQ ID NO: 103 - protein, 14 aa, Artificial Sequence
  Description of Artificial Sequence: Synthetic peptide
  N-term Acetic Acid
  MOD_RES (1)..(1): 2-amino-2-methylpropanoic acid
  MOD_RES (4)..(4): (R)-2-amino-2-methyldec-9-enoic acid
  MOD_RES (11)..(11): (S)-1-((allyloxy)carbonyl)-3-aminopyrrolidine-3-carboxylic acid
  C-term amino
XDAXDEAAFVXFWQ

SEQ ID NO: 104 - protein, 14 aa, Artificial Sequence
  Description of Artificial Sequence: Synthetic peptide
  N-term Acetic Acid
  MOD_RES (1)..(1): 2-amino-2-methylpropanoic acid
  MOD_RES (4)..(4): (R)-2-amino-2-methyldec-9-enoic acid
  MOD_RES (11)..(11): (S)-1-((allyloxy)carbonyl)-3-aminopyrrolidine-3-carboxylic acid
  MOD_RES (14)..(14): 2-amino-2-methylpropanoic acid
  C-term amino
XDAXDEAAFVXFWX

SEQ ID NO: 105 - protein, 14 aa, Artificial Sequence
  Description of Artificial Sequence: Synthetic peptide
  N-term Acetic Acid
  MOD_RES (4)..(4): (R)-2-amino-2-methyldec-9-enoic acid
  MOD_RES (11)..(11): (S)-1-((allyloxy)carbonyl)-3-aminopyrrolidine-3-carboxylic acid
  C-term amino
FDAXDDAAFVXEWQ

SEQ ID NO: 106 - protein, 14 aa, Artificial Sequence
  Description of Artificial Sequence: Synthetic peptide
  N-term Acetic Acid
  MOD_RES (4)..(4): (R)-2-amino-2-methyldec-9-enoic acid
  MOD_RES (11)..(11): (S)-1-((allyloxy)carbonyl)-3-aminopyrrolidine-3-carboxylic acid
  C-term amino
FDAXDDAAFSXFWQ

SEQ ID NO: 107 - protein, 14 aa, Artificial Sequence
  Description of Artificial Sequence: Synthetic peptide
  N-term Acetic Acid
  MOD_RES (1)..(1): (R)-2-allylpyrrolidine-2-carboxylic acid
  MOD_RES (4)..(4): 2-amino-2-(pent-4-en-1-yl)hept-6-enoic acid
  MOD_RES (11)..(11): (S)-2-amino-2-methyldec-9-enoic acid
  MOD_RES (13)..(13): (S)-2-amino-3-(5-methoxy-1H-indol-3-yl)propanoic acid
  C-term amino
XDAXDEAAFVXFXQ

SEQ ID NO: 108 - protein, 14 aa, Artificial Sequence
  Description of Artificial Sequence: Synthetic peptide
  N-term Acetic Acid
  MOD_RES (1)..(1): (R)-2-allylpyrrolidine-2-carboxylic acid
  MOD_RES (4)..(4): 2-amino-2-(pent-4-en-1-yl)hept-6-enoic acid
  MOD_RES (11)..(11): (S)-2-amino-2-methyldec-9-enoic acid
  MOD_RES (13)..(13): (S)-2-amino-3-(7-fluoro-1H-indol-3-yl)propanoic acid
  C-term amino
XDAXDEAAFVXFXQ

SEQ ID NO: 109 - protein, 14 aa, Artificial Sequence
  Description of Artificial Sequence: Synthetic peptide
  N-term Acetic Acid
  MOD_RES (1)..(1): (R)-2-allylpyrrolidine-2-carboxylic acid
  MOD_RES (4)..(4): 2-amino-2-(pent-4-en-1-yl)hept-6-enoic acid
  MOD_RES (11)..(11): (S)-2-amino-2-methyldec-9-enoic acid
  MOD_RES (13)..(13): (2S)-2-amino-3-(indolin-3-yl)propanoic acid
  C-term amino
XDAXDEAAFVXFXQ

SEQ ID NO: 110 - protein, 14 aa, Artificial Sequence
  Description of Artificial Sequence: Synthetic peptide
  N-term Acetic Acid
  MOD_RES (1)..(1): (R)-2-allylpyrrolidine-2-carboxylic acid
  MOD_RES (4)..(4): 2-amino-2-(pent-4-en-1-yl)hept-6-enoic acid
  MOD_RES (11)..(11): (S)-2-amino-2-methyldec-9-enoic acid
  MOD_RES (13)..(13): (S)-2-amino-3-(5-(trifluoromethyl)-1H-indol-3-yl)propanoic acid
  C-term amino
XDAXDEAAFVXFXQ

SEQ ID NO: 111 - protein, 14 aa, Artificial Sequence
  Description of Artificial Sequence: Synthetic peptide
  N-term Acetic Acid
  MOD_RES (1)..(1): (R)-2-allylpyrrolidine-2-carboxylic acid
  MOD_RES (4)..(4): 2-amino-2-(pent-4-en-1-yl)hept-6-enoic acid
  MOD_RES (11)..(11): (S)-2-amino-2-methyldec-9-enoic acid
  MOD_RES (13)..(13): (S)-2-amino-3-(5-cyclopropyl-1H-indol-3-yl)propanoic acid
  C-term amino
XDAXDEAAFVXFXQ

SEQ ID NO: 112 - protein, 14 aa, Artificial Sequence
  Description of Artificial Sequence: Synthetic peptide
  N-term Acetic Acid
  MOD_RES (1)..(1): (R)-2-allylpyrrolidine-2-carboxylic acid
  MOD_RES (4)..(4): 2-amino-2-(pent-4-en-1-yl)hept-6-enoic acid
  MOD_RES (6)..(6): (S)-2-amino-3-((carboxymethyl)(ethyl)amino)propanoic acid
  MOD_RES (11)..(11): (S)-2-amino-2-methyldec-9-enoic acid
  C-term amino
XDAXDXAAFVXFWQ

SEQ ID NO: 113 - protein, 14 aa, Artificial Sequence
  Description of Artificial Sequence: Synthetic peptide
  N-term Acetic Acid
  MOD_RES (1)..(1): (R)-2-allylpyrrolidine-2-carboxylic acid
  MOD_RES (4)..(4): 2-amino-2-(pent-4-en-1-yl)hept-6-enoic acid
  MOD_RES (11)..(11): (S)-2-amino-2-methyldec-9-enoic acid
  C-term amino
XDIXDDAAFQXFWH

SEQ ID NO: 114 - protein, 14 aa, Artificial Sequence
  Description of Artificial Sequence: Synthetic peptide
  N-term Acetic Acid
  MOD_RES (1)..(1): (R)-2-allylpyrrolidine-2-carboxylic acid
  MOD_RES (4)..(4): 2-amino-2-(pent-4-en-1-yl)hept-6-enoic acid
  MOD_RES (11)..(11): (S)-2-amino-2-methyldec-9-enoic acid
  C-term amino
XDIXDEAAFVXFWH

SEQ ID NO: 115 - protein, 14 aa, Artificial Sequence
  Description of Artificial Sequence: Synthetic peptide
  N-term Acetic Acid
  MOD_RES (1)..(1): (R)-2-allylpyrrolidine-2-carboxylic acid
  MOD_RES (4)..(4): 2-amino-2-(pent-4-en-1-yl)hept-6-enoic acid
  MOD_RES (11)..(11): (S)-2-amino-2-methyldec-9-enoic acid
  C-term amino
XDAXDEAAFQXFWH

SEQ ID NO: 116 - protein, 14 aa, Artificial Sequence
  Description of Artificial Sequence: Synthetic peptide
  N-term Acetic Acid
  MOD_RES (1)..(1): (R)-2-allylpyrrolidine-2-carboxylic acid
  MOD_RES (4)..(4): 2-amino-2-(pent-4-en-1-yl)hept-6-enoic acid
  MOD_RES (11)..(11): (S)-2-amino-2-methyldec-9-enoic acid
  C-term amino
XDIXDEAAFQXFWQ

SEQ ID NO: 117 - protein, 14 aa, Artificial Sequence
  Description of Artificial Sequence: Synthetic peptide
  N-term Acetic Acid
  MOD_RES (1)..(1): (R)-2-allylpyrrolidine-2-carboxylic acid
  MOD_RES (4)..(4): 2-amino-2-(pent-4-en-1-yl)hept-6-enoic acid
  MOD_RES (6)..(6): D-glutamic acid
  MOD_RES (11)..(11): (S)-2-amino-2-methyldec-9-enoic acid
  C-term amino
XDAXDEAAFVXFWQ

SEQ ID NO: 118 - protein, 14 aa, Artificial Sequence
  Description of Artificial Sequence: Synthetic peptide
  N-term Acetic Acid
  MOD_RES (1)..(1): (R)-2-allylpyrrolidine-2-carboxylic acid
  MOD_RES (4)..(4): 2-amino-2-(pent-4-en-1-yl)hept-6-enoic acid
  MOD_RES (11)..(11): (S)-2-amino-2-methyldec-9-enoic acid
  MOD_RES (12)..(12): (S)-2-amino-3-(perfluorophenyl)propanoic acid
  C-term amino
XDAXDEAAFVXFWQ

SEQ ID NO: 119 - protein, 14 aa, Artificial Sequence
  Description of Artificial Sequence: Synthetic peptide
  N-term Acetic Acid
  MOD_RES (1)..(1): (R)-2-allylpyrrolidine-2-carboxylic acid
  MOD_RES (4)..(4): 2-amino-2-(pent-4-en-1-yl)hept-6-enoic acid
  MOD_RES (9)..(9): (S)-2-amino-3-(3,4-difluorophenyl)propanoic acid
  MOD_RES (11)..(11): (S)-2-amino-2-methyldec-9-enoic acid
  MOD_RES (13)..(13): (S)-2-amino-3-(naphthalen-2-yl)propanoic acid
  C-term amino
XDAXDEAAFVXFXQ

SEQ ID NO: 120 - protein, 14 aa, Artificial Sequence
  Description of Artificial Sequence: Synthetic peptide
  N-term Acetic Acid
  MOD_RES (1)..(1): (R)-2-allylpyrrolidine-2-carboxylic acid
  MOD_RES (4)..(4): 2-amino-2-(pent-4-en-1-yl)hept-6-enoic acid
  MOD_RES (9)..(9): (S)-2-amino-3-(3,4-difluorophenyl)propanoic acid
  MOD_RES (11)..(11): (S)-2-amino-2-methyldec-9-enoic acid
  MOD_RES (13)..(13): (S)-2-amino-3-(naphthalen-2-yl)propanoic acid
  C-term amino
XDAXDEAAFAXFXA

SEQ ID NO: 121 - protein, 14 aa, Artificial Sequence
  Description of Artificial Sequence: Synthetic peptide
  N-term Acetic Acid
  MOD_RES (1)..(1): (R)-2-allylpyrrolidine-2-carboxylic acid
  MOD_RES (4)..(4): 2-amino-2-(pent-4-en-1-yl)hept-6-enoic acid
  MOD_RES (11)..(11): (S)-2-amino-2-methyldec-9-enoic acid
  C-term amino
XDAXDEAAFAXFWA

SEQ ID NO: 122 - protein, 14 aa, Artificial Sequence
  Description of Artificial Sequence: Synthetic peptide
  N-term Acetic Acid
  MOD_RES (1)..(1): (R)-2-allylpyrrolidine-2-carboxylic acid
  MOD_RES (4)..(4): 2-amino-2-(pent-4-en-1-yl)hept-6-enoic acid
  MOD_RES (11)..(11): (S)-5-(((allyloxy)carbonyl)(methyl)amino)-2-amino-2- methylpentanoic acid
  C-term amino
XDIXDDAAFQXFWH

SEQ ID NO: 123 - protein, 13 aa, Artificial Sequence
  Description of Artificial Sequence: Synthetic peptide
  N-term Acetic Acid
  MOD_RES (1)..(1): (R)-2-allylpyrrolidine-2-carboxylic acid
  MOD_RES (4)..(4): 2-amino-2-(pent-4-en-1-yl)hept-6-enoic acid
  MOD_RES (11)..(11): (S)-2-amino-2-methyldec-9-enoic acid
  C-term amino
XDIXDEAAFQXFW

SEQ ID NO: 124 - protein, 14 aa, Artificial Sequence
  Description of Artificial Sequence: Synthetic peptide
  N-term Acetic Acid
  MOD_RES (1)..(1): (R)-2-allylpyrrolidine-2-carboxylic acid
  MOD_RES (4)..(4): 2-amino-2-(pent-4-en-1-yl)hept-6-enoic acid
  MOD_RES (11)..(11): (S)-2-amino-2-methyldec-9-enoic acid
  C-term amino
XDIXDEAAFQXFWA

SEQ ID NO: 125 - protein, 14 aa, Artificial Sequence
  Description of Artificial Sequence: Synthetic peptide
  N-term Acetic Acid
  MOD_RES (1)..(1): (R)-2-allylpyrrolidine-2-carboxylic acid
  MOD_RES (4)..(4): 2-amino-2-(pent-4-en-1-yl)hept-6-enoic acid
  MOD_RES (6)..(6): (S)-2-amino-4-phenylbutanoic acid
  MOD_RES (11)..(11): (S)-2-amino-2-methyldec-9-enoic acid
  C-term amino
XDAXDXAAFVXFWQ

SEQ ID NO: 126 - protein, 14 aa, Artificial Sequence
  Description of Artificial Sequence: Synthetic peptide
  N-term Acetic Acid
  MOD_RES (1)..(1): (R)-2-allylpyrrolidine-2-carboxylic acid
  MOD_RES (4)..(4): 2-amino-2-(pent-4-en-1-yl)hept-6-enoic acid
  MOD_RES (5)..(5): (S)-2-amino-4-phenylbutanoic acid
  MOD_RES (11)..(11): (S)-2-amino-2-methyldec-9-enoic acid
  C-term amino
XDAXXEAAFVXFWQ

SEQ ID NO: 127 - protein, 14 aa, Artificial Sequence
  Description of Artificial Sequence: Synthetic peptide
  N-term Acetic Acid
  MOD_RES (1)..(1): (R)-2-allylpyrrolidine-2-carboxylic acid
  MOD_RES (4)..(4): 2-amino-2-(pent-4-en-1-yl)hept-6-enoic acid
  MOD_RES (11)..(11): (S)-2-amino-2-methyldec-9-enoic acid
  C-term amino
XDAXNEAAFVXFWQ

SEQ ID NO: 128 - protein, 14 aa, Artificial Sequence
  Description of Artificial Sequence: Synthetic peptide
  N-term Acetic Acid
  MOD_RES (1)..(1): (R)-2-allylpyrrolidine-2-carboxylic acid
  MOD_RES (4)..(4): 2-amino-2-(pent-4-en-1-yl)hept-6-enoic acid
  MOD_RES (11)..(11): (S)-2-amino-2-methyldec-9-enoic acid
  C-term amino
XNAXDEAAFVXFWQ

SEQ ID NO: 129 - protein, 14 aa, Artificial Sequence
  Description of Artificial Sequence: Synthetic peptide
  N-term Acetic Acid
  MOD_RES (1)..(1): (R)-2-allylpyrrolidine-2-carboxylic acid
  MOD_RES (4)..(4): 2-amino-2-(pent-4-en-1-yl)hept-6-enoic acid
  MOD_RES (11)..(11): (S)-2-amino-2-methyldec-9-enoic acid
  C-term amino
XFAXDEAAFVXFWQ

SEQ ID NO: 130 - protein, 14 aa, Artificial Sequence
  Description of Artificial Sequence: Synthetic peptide
  N-term Acetic Acid
  MOD_RES (1)..(1): (R)-2-allylpyrrolidine-2-carboxylic acid
  MOD_RES (4)..(4): 2-amino-2-(pent-4-en-1-yl)hept-6-enoic acid
  MOD_RES (11)..(11): (S)-2-amino-2-methyldec-9-enoic acid
  C-term amino
XYAXDEAAFVXFWQ

SEQ ID NO: 131 - protein, 14 aa, Artificial Sequence
  Description of Artificial Sequence: Synthetic peptide
  N-term Acetic Acid
  MOD_RES (1)..(1): (R)-2-allylpyrrolidine-2-carboxylic acid
  MOD_RES (2)..(2): (S)-2-amino-3-(m-tolyl)propanoic acid
  MOD_RES (4)..(4): 2-amino-2-(pent-4-en-1-yl)hept-6-enoic acid
  MOD_RES (11)..(11): (S)-2-amino-2-methyldec-9-enoic acid
  C-term amino
XXAXDEAAFVXFWQ

SEQ ID NO: 132 - protein, 14 aa, Artificial Sequence
  Description of Artificial Sequence: Synthetic peptide
  N-term Acetic Acid
  MOD_RES (1)..(1): (R)-2-allylpyrrolidine-2-carboxylic acid
  MOD_RES (2)..(2): (S)-2-amino-3-(3-fluorophenyl)propanoic acid
  MOD_RES (4)..(4): 2-amino-2-(pent-4-en-1-yl)hept-6-enoic acid
  MOD_RES (11)..(11): (S)-2-amino-2-methyldec-9-enoic acid
  C-term amino
XFAXDEAAFVXFWQ

SEQ ID NO: 133 - protein, 14 aa, Artificial Sequence
  Description of Artificial Sequence: Synthetic peptide
  N-term Acetic Acid
  MOD_RES (1)..(1): (R)-2-allylpyrrolidine-2-carboxylic acid
  MOD_RES (4)..(4): 2-amino-2-(pent-4-en-1-yl)hept-6-enoic acid
  MOD_RES (5)..(5): (S)-2-aminohexanoic acid
  MOD_RES (11)..(11): (S)-2-amino-2-methyldec-9-enoic acid
  C-term amino
XDAXXEAAFVXFWQ

SEQ ID NO: 134 - protein, 14 aa, Artificial Sequence
  Description of Artificial Sequence: Synthetic peptide
  N-term Acetic Acid
  MOD_RES (1)..(1): (R)-2-allylpyrrolidine-2-carboxylic acid
  MOD_RES (4)..(4): 2-amino-2-(pent-4-en-1-yl)hept-6-enoic acid
  MOD_RES (11)..(11): (S)-2-amino-2-methyldec-9-enoic acid
  C-term amino
XDAXHEAAFVXFWQ

SEQ ID NO: 135 - protein, 14 aa, Artificial Sequence
  Description of Artificial Sequence: Synthetic peptide
  N-term Acetic Acid
  MOD_RES (1)..(1): (R)-2-allylpyrrolidine-2-carboxylic acid
  MOD_RES (4)..(4): 2-amino-2-(pent-4-en-1-yl)hept-6-enoic acid
  MOD_RES (9)..(9): (S)-2-amino-3-(m-tolyl)propanoic acid
  MOD_RES (11)..(11): (S)-2-amino-2-methyldec-9-enoic acid
  C-term amino
XDAXDEAAXVXFWQ

SEQ ID NO: 136 - protein, 14 aa, Artificial Sequence
  Description of Artificial Sequence: Synthetic peptide
  N-term Acetic Acid
  MOD_RES (1)..(1): (R)-2-allylpyrrolidine-2-carboxylic acid
  MOD_RES (4)..(4): 2-amino-2-(pent-4-en-1-yl)hept-6-enoic acid
  MOD_RES (9)..(9): (S)-2-amino-3-(3,4,5-trifluorophenyl)propanoic acid
  MOD_RES (11)..(11): (S)-2-amino-2-methyldec-9-enoic acid
  C-term amino
XDAXDEAAFVXFWQ

SEQ ID NO: 137 - protein, 14 aa, Artificial Sequence
  Description of Artificial Sequence: Synthetic peptide
  N-term Acetic Acid
  MOD_RES (1)..(1): (R)-2-allylpyrrolidine-2-carboxylic acid
  MOD_RES (4)..(4): 2-amino-2-(pent-4-en-1-yl)hept-6-enoic acid
  MOD_RES (5)..(5): (S)-2-amino-3-(pyridin-3-yl)propanoic acid
  MOD_RES (11)..(11): (S)-2-amino-2-methyldec-9-enoic acid
  C-term amino
XDAXXEAAFVXFWQ

SEQ ID NO: 138 - protein, 14 aa, Artificial Sequence
  Description of Artificial Sequence: Synthetic peptide
  N-term Acetic Acid
  MOD_RES (1)..(1): (R)-2-allylpyrrolidine-2-carboxylic acid
  MOD_RES (4)..(4): 2-amino-2-(pent-4-en-1-yl)hept-6-enoic acid
  MOD_RES (5)..(5): (S)-2-amino-3-(pyridin-4-yl)propanoic acid
  MOD_RES (11)..(11): (S)-2-amino-2-methyldec-9-enoic acid
  C-term amino
XDAXXEAAFVXFWQ

SEQ ID NO: 139 - protein, 14 aa, Artificial Sequence
  Description of Artificial Sequence: Synthetic peptide
  N-term Acetic Acid
  MOD_RES (1)..(1): (R)-2-allylpyrrolidine-2-carboxylic acid
  MOD_RES (4)..(4): 2-amino-2-(pent-4-en-1-yl)hept-6-enoic acid
  MOD_RES (6)..(6): (R)-2-amino-2,4-dimethylpentanoic acid
  MOD_RES (11)..(11): (S)-2-amino-2-methyldec-9-enoic acid
  C-term amino
XDAXDXAAFVXFWQ

SEQ ID NO: 140 - protein, 14 aa, Artificial Sequence
  Description of Artificial Sequence: Synthetic peptide
  N-term Acetic Acid
  MOD_RES (1)..(1): (R)-2-allylpyrrolidine-2-carboxylic acid
  MOD_RES (4)..(4): 2-amino-2-(pent-4-en-1-yl)hept-6-enoic acid
  MOD_RES (9)..(9): (S)-2-amino-3-(4-methoxyphenyl)propanoic acid
  MOD_RES (11)..(11): (S)-2-amino-2-methyldec-9-enoic acid
  C-term amino
XDAXDEAAXVXFWQ

SEQ ID NO: 141 - protein, 14 aa, Artificial Sequence
  Description of Artificial Sequence: Synthetic peptide
  N-term Acetic Acid
  MOD_RES (1)..(1): (R)-2-allylpyrrolidine-2-carboxylic acid
  MOD_RES (4)..(4): 2-amino-2-(pent-4-en-1-yl)hept-6-enoic acid
  MOD_RES (9)..(9): (S)-2-amino-3-(3,5-difluorophenyl)propanoic acid
  MOD_RES (11)..(11): (S)-2-amino-2-methyldec-9-enoic acid
  C-term amino
XDAXDEAAFVXFWQ

SEQ ID NO: 142 - protein, 14 aa, Artificial Sequence
  Description of Artificial Sequence: Synthetic peptide
  N-term Acetic Acid
  MOD_RES (4)..(4): (R)-2-amino-2-methyldec-9-enoic acid
  MOD_RES (11)..(11): (S)-1-((allyloxy)carbonyl)-3-aminopyrrolidine-3-carboxylic acid
  C-term amino
FDAXDDAAFTXFWQ

SEQ ID NO: 143 - protein, 14 aa, Artificial Sequence
  Description of Artificial Sequence: Synthetic peptide
  N-term Acetic Acid
  MOD_RES (4)..(4): (R)-2-amino-2-methyldec-9-enoic acid
  MOD_RES (11)..(11): (S)-1-((allyloxy)carbonyl)-3-aminopyrrolidine-3-carboxylic acid
  MOD_RES (12)..(12): (S)-2-amino-3-(perfluorophenyl)propanoic acid
  C-term amino
FDAXDDAAFVXFWQ

SEQ ID NO: 144 - protein, 14 aa, Artificial Sequence
  Description of Artificial Sequence: Synthetic peptide
  N-term Acetic Acid
  MOD_RES (1)..(1): (R)-2-allylpyrrolidine-2-carboxylic acid
  MOD_RES (4)..(4): 2-amino-2-(pent-4-en-1-yl)hept-6-enoic acid
  MOD_RES (5)..(5): (S)-2-amino-3-(pyridin-2-yl)propanoic acid
  MOD_RES (11)..(11): (S)-2-amino-2-methyldec-9-enoic acid
  C-term amino
XDAXXEAAFVXFWQ

SEQ ID NO: 145 - protein, 14 aa, Artificial Sequence
  Description of Artificial Sequence: Synthetic peptide
  N-term Acetic Acid
  MOD_RES (1)..(1): (R)-2-allylpyrrolidine-2-carboxylic acid
  MOD_RES (4)..(4): 2-amino-2-(pent-4-en-1-yl)hept-6-enoic acid
  MOD_RES (6)..(6): (S)-2-amino-3-(benzo[b]thiophen-3-yl)propanoic acid
  MOD_RES (11)..(11): (S)-2-amino-2-methyldec-9-enoic acid
  C-term amino
XDAXDXAAFVXFWQ

SEQ ID NO: 146 - protein, 14 aa, Artificial Sequence
  Description of Artificial Sequence: Synthetic peptide
  N-term Acetic Acid
  MOD_RES (1)..(1): (R)-2-allylpyrrolidine-2-carboxylic acid
  MOD_RES (4)..(4): 2-amino-2-(pent-4-en-1-yl)hept-6-enoic acid
  MOD_RES (6)..(6): (S)-2-amino-3-(naphthalen-2-yl)propanoic acid
  MOD_RES (11)..(11): (S)-2-amino-2-methyldec-9-enoic acid
  C-term amino
XDAXDXAAFVXFWQ

SEQ ID NO: 147 - protein, 14 aa, Artificial Sequence
  Description of Artificial Sequence: Synthetic peptide
  N-term Acetic Acid
  MOD_RES (1)..(1): (R)-2-allylpyrrolidine-2-carboxylic acid
  MOD_RES (4)..(4): 2-amino-2-(pent-4-en-1-yl)hept-6-enoic acid
  MOD_RES (11)..(11): (S)-2-amino-2-methyldec-9-enoic acid
  C-term amino
XDAXDWAAFVXFWQ

SEQ ID NO: 148 - protein, 14 aa, Artificial Sequence
  Description of Artificial Sequence: Synthetic peptide
  N-term Acetic Acid
  MOD_RES (1)..(1): (R)-2-allylpyrrolidine-2-carboxylic acid
  MOD_RES (4)..(4): 2-amino-2-(pent-4-en-1-yl)hept-6-enoic acid
  MOD_RES (6)..(6): (S)-2-amino-3-(naphthalen-1-yl)propanoic acid
  MOD_RES (11)..(11): (S)-2-amino-2-methyldec-9-enoic acid
  C-term amino
XDAXDXAAFVXFWQ

SEQ ID NO: 149 - protein, 14 aa, Artificial Sequence
  Description of Artificial Sequence: Synthetic peptide
  N-term Acetic Acid
  MOD_RES (1)..(1): (R)-2-allylpyrrolidine-2-carboxylic acid
  MOD_RES (4)..(4): 2-amino-2-(pent-4-en-1-yl)hept-6-enoic acid
  MOD_RES (6)..(6): (S)-3-([1,1'-biphenyl]-4-yl)-2-aminopropanoic acid
  MOD_RES (11)..(11): (S)-2-amino-2-methyldec-9-enoic acid
  C-term amino
XDAXDXAAFVXFWQ

SEQ ID NO: 150 - protein, 14 aa, Artificial Sequence
  Description of Artificial Sequence: Synthetic peptide
  N-term Acetic Acid
  MOD_RES (1)..(1): (R)-2-allylpyrrolidine-2-carboxylic acid
  MOD_RES (4)..(4): 2-amino-2-(pent-4-en-1-yl)hept-6-enoic acid
  MOD_RES (9)..(9): (S)-2-amino-3-(3-(trifluoromethyl)phenyl)propanoic acid
  MOD_RES (11)..(11): (S)-2-amino-2-methyldec-9-enoic acid
  C-term amino
XDAXDDAAFVXFWQ

SEQ ID NO: 151 - protein, 14 aa, Artificial Sequence
  Description of Artificial Sequence: Synthetic peptide
  N-term Acetic Acid
  MOD_RES (1)..(1): (R)-2-allylpyrrolidine-2-carboxylic acid
  MOD_RES (4)..(4): 2-amino-2-(pent-4-en-1-yl)hept-6-enoic acid
  MOD_RES (9)..(9): (S)-2-amino-3-(4-(trifluoromethyl)phenyl)propanoic acid
  MOD_RES (11)..(11): (S)-2-amino-2-methyldec-9-enoic acid
  C-term amino
XDAXDDAAFVXFWQ

SEQ ID NO: 152 - protein, 14 aa, Artificial Sequence
  Description of Artificial Sequence: Synthetic peptide
  N-term Acetic Acid
  MOD_RES (1)..(1): (R)-2-allylpyrrolidine-2-carboxylic acid
  MOD_RES (4)..(4): 2-amino-2-(pent-4-en-1-yl)hept-6-enoic acid
  MOD_RES (6)..(6): (S)-2-amino-3-(3-(trifluoromethyl)phenyl)propanoic acid
  MOD_RES (11)..(11): (S)-2-amino-2-methyldec-9-enoic acid
  C-term amino
XDAXDFAAFVXFWQ

SEQ ID NO: 153 - protein, 14 aa, Artificial Sequence
  Description of Artificial Sequence: Synthetic peptide
  N-term Acetic Acid
  MOD_RES (1)..(1): (R)-2-allylpyrrolidine-2-carboxylic acid
  MOD_RES (4)..(4): 2-amino-2-(pent-4-en-1-yl)hept-6-enoic acid
  MOD_RES (6)..(6): (S)-2-amino-3-(4-(trifluoromethyl)phenyl)propanoic acid
  MOD_RES (11)..(11): (S)-2-amino-2-methyldec-9-enoic acid
  C-term amino
XDAXDFAAFVXFWQ

SEQ ID NO: 154 - protein, 14 aa, Artificial Sequence
  Description of Artificial Sequence: Synthetic peptide
  N-term Acetic Acid
  MOD_RES (1)..(1): (R)-2-allylpyrrolidine-2-carboxylic acid
  MOD_RES (4)..(4): 2-amino-2-(pent-4-en-1-yl)hept-6-enoic acid
  MOD_RES (11)..(11): (S)-2-amino-2-methyldec-9-enoic acid
  MOD_RES (12)..(12): (S)-2-amino-3-(3-(trifluoromethyl)phenyl)propanoic acid
  C-term amino
XDAXDDAAFVXFWQ

SEQ ID NO: 155 - protein, 14 aa, Artificial Sequence
  Description of Artificial Sequence: Synthetic peptide
  N-term Acetic Acid
  MOD_RES (1)..(1): (R)-2-allylpyrrolidine-2-carboxylic acid
  MOD_RES (4)..(4): 2-amino-2-(pent-4-en-1-yl)hept-6-enoic acid
  MOD_RES (11)..(11): (S)-2-amino-2-methyldec-9-enoic acid
  MOD_RES (12)..(12): (S)-2-amino-3-(4-(trifluoromethyl)phenyl)propanoic acid
  C-term amino
XDAXDDAAFVXFWQ

SEQ ID NO: 156 - protein, 14 aa, Artificial Sequence
  Description of Artificial Sequence: Synthetic peptide
  N-term Acetic Acid
  MOD_RES (1)..(1): (R)-2-allylpyrrolidine-2-carboxylic acid
  MOD_RES (4)..(4): 2-amino-2-(pent-4-en-1-yl)hept-6-enoic acid
  MOD_RES (6)..(6): 2-amino-3-(6-fluoronaphthalen-1-yl)propanoic acid
  MOD_RES (11)..(11): (S)-2-amino-2-methyldec-9-enoic acid
  C-term amino
XDAXDXAAFVXFWQ

SEQ ID NO: 157 - protein, 14 aa, Artificial Sequence
  Description of Artificial Sequence: Synthetic peptide
  N-term Acetic Acid
  MOD_RES (1)..(1): (R)-2-allylpyrrolidine-2-carboxylic acid
  MOD_RES (4)..(4): 2-amino-2-(pent-4-en-1-yl)hept-6-enoic acid
  MOD_RES (6)..(6): (S)-2-amino-3-(3-fluorophenyl)propanoic acid
  MOD_RES (11)..(11): (S)-2-amino-2-methyldec-9-enoic acid
  C-term amino
XDAXDFAAFVXFWQ

SEQ ID NO: 158 - protein, 14 aa, Artificial Sequence
  Description of Artificial Sequence: Synthetic peptide
  N-term Acetic Acid
  MOD_RES (1)..(1): (R)-2-allylpyrrolidine-2-carboxylic acid
  MOD_RES (4)..(4): 2-amino-2-(pent-4-en-1-yl)hept-6-enoic acid
  MOD_RES (6)..(6): (S)-2-amino-3-(4-fluorophenyl)propanoic acid
  MOD_RES (11)..(11): (S)-2-amino-2-methyldec-9-enoic acid
  C-term amino
XDAXDFAAFVXFWQ

SEQ ID NO: 159 - protein, 14 aa, Artificial Sequence
  Description of Artificial Sequence: Synthetic peptide
  N-term Acetic Acid
  MOD_RES (1)..(1): (R)-2-allylpyrrolidine-2-carboxylic acid
  MOD_RES (4)..(4): 2-amino-2-(pent-4-en-1-yl)hept-6-enoic acid
  MOD_RES (6)..(6): (S)-2-amino-3-(3,4-difluorophenyl)propanoic acid
  MOD_RES (11)..(11): (S)-2-amino-2-methyldec-9-enoic acid
  C-term amino
XDAXDFAAFVXFWQ

SEQ ID NO: 160 - protein, 14 aa, Artificial Sequence
  Description of Artificial Sequence: Synthetic peptide
  N-term Acetic Acid
  MOD_RES (1)..(1): (R)-2-allylpyrrolidine-2-carboxylic acid
  MOD_RES (4)..(4): 2-amino-2-(pent-4-en-1-yl)hept-6-enoic acid
  MOD_RES (11)..(11): (S)-2-amino-2-methyldec-9-enoic acid
  MOD_RES (12)..(12): (S)-2-amino-3-(3-fluorophenyl)propanoic acid
  C-term amino
XDAXDDAAFVXFWQ

SEQ ID NO: 161 - protein, 14 aa, Artificial Sequence
  Description of Artificial Sequence: Synthetic peptide
  N-term Acetic Acid
  MOD_RES (1)..(1): (R)-2-allylpyrrolidine-2-carboxylic acid
  MOD_RES (4)..(4): 2-amino-2-(pent-4-en-1-yl)hept-6-enoic acid
  MOD_RES (11)..(11): (S)-2-amino-2-methyldec-9-enoic acid
  MOD_RES (12)..(12): (S)-2-amino-3-(4-fluorophenyl)propanoic acid
  C-term amino
XDAXDDAAFVXFWQ

SEQ ID NO: 162 - protein, 14 aa, Artificial Sequence
  Description of Artificial Sequence: Synthetic peptide
  N-term Acetic Acid
  MOD_RES (1)..(1): (R)-2-allylpyrrolidine-2-carboxylic acid
  MOD_RES (4)..(4): 2-amino-2-(pent-4-en-1-yl)hept-6-enoic acid
  MOD_RES (11)..(11): (S)-2-amino-2-methyldec-9-enoic acid
  MOD_RES (12)..(12): (S)-2-amino-3-(3,4-difluorophenyl)propanoic acid
  C-term amino
XDAXDDAAFVXFWQ

SEQ ID NO: 163 - protein, 14 aa, Artificial Sequence
  Description of Artificial Sequence: Synthetic peptide
  N-term Acetic Acid
  MOD_RES (1)..(1): (R)-2-allylpyrrolidine-2-carboxylic acid
  MOD_RES (4)..(4): 2-amino-2-(pent-4-en-1-yl)hept-6-enoic acid
  MOD_RES (9)..(9): (S)-2-amino-3-(3-fluorophenyl)propanoic acid
  MOD_RES (11)..(11): (S)-2-amino-2-methyldec-9-enoic acid
  C-term amino
XDAXDDAAFVXFWQ

SEQ ID NO: 164 - protein, 14 aa, Artificial Sequence
  Description of Artificial Sequence: Synthetic peptide
  N-term Acetic Acid
  MOD_RES (1)..(1): (R)-2-allylpyrrolidine-2-carboxylic acid
  MOD_RES (4)..(4): 2-amino-2-(pent-4-en-1-yl)hept-6-enoic acid
  MOD_RES (9)..(9): (S)-2-amino-3-(4-fluorophenyl)propanoic acid
  MOD_RES (11)..(11): (S)-2-amino-2-methyldec-9-enoic acid
  C-term amino
XDAXDDAAFVXFWQ

SEQ ID NO: 165 - protein, 14 aa, Artificial Sequence
  Description of Artificial Sequence: Synthetic peptide
  N-term Acetic Acid
  MOD_RES (1)..(1): (R)-2-allylpyrrolidine-2-carboxylic acid
  MOD_RES (4)..(4): 2-amino-2-(pent-4-en-1-yl)hept-6-enoic acid
  MOD_RES (9)..(9): (S)-2-amino-3-(3,4-difluorophenyl)propanoic acid
  MOD_RES (11)..(11): (S)-2-amino-2-methyldec-9-enoic acid
  C-term amino
XDAXDDAAFVXFWQ

SEQ ID NO: 166 - protein, 14 aa, Artificial Sequence
  Description of Artificial Sequence: Synthetic peptide
  N-term Acetic Acid
  MOD_RES (1)..(1): (R)-2-allylpyrrolidine-2-carboxylic acid
  MOD_RES (4)..(4): 2-amino-2-(pent-4-en-1-yl)hept-6-enoic acid
  MOD_RES (11)..(11): (S)-2-amino-2-methyldec-9-enoic acid
  MOD_RES (12)..(12): (S)-2-amino-4-phenylbutanoic acid
  C-term amino
XDAXDDAAFVXXWQ

SEQ ID NO: 167 - protein, 14 aa, Artificial Sequence
  Description of Artificial Sequence: Synthetic peptide
  N-term Acetic Acid
  MOD_RES (1)..(1): (R)-2-allylpyrrolidine-2-carboxylic acid
  MOD_RES (4)..(4): 2-amino-2-(pent-4-en-1-yl)hept-6-enoic acid
  MOD_RES (11)..(11): (S)-2-amino-2-methyldec-9-enoic acid
  MOD_RES (12)..(12): (S)-2-amino-4-(4-hydroxyphenyl)butanoic acid
  C-term amino
XDAXDDAAFVXXWQ

SEQ ID NO: 168 - protein, 14 aa, Artificial Sequence
  Description of Artificial Sequence: Synthetic peptide
  N-term Acetic Acid
  MOD_RES (1)..(1): (R)-2-allylpyrrolidine-2-carboxylic acid
  MOD_RES (4)..(4): 2-amino-2-(pent-4-en-1-yl)hept-6-enoic acid
  MOD_RES (6)..(6): (S)-2-amino-3-(pyridin-2-yl)propanoic acid
  MOD_RES (11)..(11): (S)-2-amino-2-methyldec-9-enoic acid
  C-term amino
XDAXDXAAFVXFWQ

SEQ ID NO: 169 - protein, 14 aa, Artificial Sequence
  Description of Artificial Sequence: Synthetic peptide
  N-term Acetic Acid
  MOD_RES (1)..(1): (R)-2-allylpyrrolidine-2-carboxylic acid
  MOD_RES (4)..(4): 2-amino-2-(pent-4-en-1-yl)hept-6-enoic acid
  MOD_RES (6)..(6): (S)-2-amino-3-(pyridin-3-yl)propanoic acid
  MOD_RES (11)..(11): (S)-2-amino-2-methyldec-9-enoic acid
  C-term amino
XDAXDXAAFVXFWQ

SEQ ID NO: 170 - protein, 14 aa, Artificial Sequence
  Description of Artificial Sequence: Synthetic peptide
  N-term Acetic Acid
  MOD_RES (1)..(1): (R)-2-allylpyrrolidine-2-carboxylic acid
  MOD_RES (4)..(4): 2-amino-2-(pent-4-en-1-yl)hept-6-enoic acid
  MOD_RES (6)..(6): (S)-2-amino-3-(pyridin-4-yl)propanoic acid
  MOD_RES (11)..(11): (S)-2-amino-2-methyldec-9-enoic acid
  C-term amino
XDAXDXAAFVXFWQ

SEQ ID NO: 171 - protein, 14 aa, Artificial Sequence
  Description of Artificial Sequence: Synthetic peptide
  N-term Acetic Acid
  MOD_RES (1)..(1): (R)-2-allylpyrrolidine-2-carboxylic acid
  MOD_RES (4)..(4): 2-amino-2-(pent-4-en-1-yl)hept-6-enoic acid
  MOD_RES (6)..(6): (S)-2-amino-4-(4-hydroxyphenyl)butanoic acid
  MOD_RES (11)..(11): (S)-2-amino-2-methyldec-9-enoic acid
  C-term amino
XDAXDXAAFVXFWQ

SEQ ID NO: 172 - protein, 14 aa, Artificial Sequence
  Description of Artificial Sequence: Synthetic peptide
  N-term Acetic Acid
  MOD_RES (1)..(1): (R)-2-allylpyrrolidine-2-carboxylic acid
  MOD_RES (4)..(4): 2-amino-2-(pent-4-en-1-yl)hept-6-enoic acid
  MOD_RES (11)..(11): (S)-2-amino-2-methyldec-9-enoic acid
  C-term amino
XDAXDYAAFVXFWQ

SEQ ID NO: 173 - protein, 14 aa, Artificial Sequence
  Description of Artificial Sequence: Synthetic peptide
  N-term Acetic Acid
  MOD_RES (1)..(1): (R)-2-allylpyrrolidine-2-carboxylic acid
  MOD_RES (4)..(4): 2-amino-2-(pent-4-en-1-yl)hept-6-enoic acid
  MOD_RES (11)..(11): (S)-2-amino-2-methyldec-9-enoic acid
  MOD_RES (12)..(12): (S)-2-amino-3-(naphthalen-1-yl)propanoic acid
  C-term amino
XDAXDDAAFVXXWQ

SEQ ID NO: 174 - protein, 14 aa, Artificial Sequence
  Description of Artificial Sequence: Synthetic peptide
  N-term Acetic Acid
  MOD_RES (1)..(1): (R)-2-allylpyrrolidine-2-carboxylic acid
  MOD_RES (4)..(4): 2-amino-2-(pent-4-en-1-yl)hept-6-enoic acid
  MOD_RES (11)..(11): (S)-2-amino-2-methyldec-9-enoic acid
  MOD_RES (12)..(12): (S)-2-amino-3-(naphthalen-2-yl)propanoic acid
  C-term amino
XDAXDDAAFVXXWQ

SEQ ID NO: 175 - protein, 14 aa, Artificial Sequence
  Description of Artificial Sequence: Synthetic peptide
  N-term Acetic Acid
  MOD_RES (1)..(1): (R)-2-allylpyrrolidine-2-carboxylic acid
  MOD_RES (4)..(4): 2-amino-2-(pent-4-en-1-yl)hept-6-enoic acid
  MOD_RES (11)..(11): (S)-2-amino-2-methyldec-9-enoic acid
  C-term amino
XEAXDDAAFVXFWQ

SEQ ID NO: 176 - protein, 14 aa, Artificial Sequence
  Description of Artificial Sequence: Synthetic peptide
  N-term Acetic Acid
  MOD_RES (1)..(1): (R)-2-allylpyrrolidine-2-carboxylic acid
  MOD_RES (4)..(4): 2-amino-2-(pent-4-en-1-yl)hept-6-enoic acid
  MOD_RES (11)..(11): (S)-2-amino-2-methyldec-9-enoic acid
  C-term amino
XDAXEDAAFVXFWQ

SEQ ID NO: 177 - protein, 14 aa, Artificial Sequence
  Description of Artificial Sequence: Synthetic peptide
  N-term Acetic Acid
  MOD_RES (1)..(1): (R)-2-allylpyrrolidine-2-carboxylic acid
  MOD_RES (4)..(4): 2-amino-2-(pent-4-en-1-yl)hept-6-enoic acid
  MOD_RES (11)..(11): (S)-2-amino-2-methyldec-9-enoic acid
  C-term amino
XDAXDDAAFVXDWQ

SEQ ID NO: 178 - protein, 14 aa, Artificial Sequence
  Description of Artificial Sequence: Synthetic peptide
  N-term Acetic Acid
  MOD_RES (1)..(1): (R)-2-allylpyrrolidine-2-carboxylic acid
  MOD_RES (4)..(4): 2-amino-2-(pent-4-en-1-yl)hept-6-enoic acid
  MOD_RES (11)..(11): (S)-2-amino-2-methyldec-9-enoic acid
  C-term amino
XDAXDDAAFVXNWQ

SEQ ID NO: 179 - protein, 14 aa, Artificial Sequence
  Description of Artificial Sequence: Synthetic peptide
  N-term Acetic Acid
  MOD_RES (1)..(1): (R)-2-allylpyrrolidine-2-carboxylic acid
  MOD_RES (4)..(4): 2-amino-2-(pent-4-en-1-yl)hept-6-enoic acid
  MOD_RES (11)..(11): (S)-2-amino-2-methyldec-9-enoic acid
  C-term amino
XDAXDDAAFVXHWQ

SEQ ID NO: 180 - protein, 14 aa, Artificial Sequence
  Description of Artificial Sequence: Synthetic peptide
  N-term Acetic Acid
  MOD_RES (1)..(1): (R)-2-allylpyrrolidine-2-carboxylic acid
  MOD_RES (4)..(4): 2-amino-2-(pent-4-en-1-yl)hept-6-enoic acid
  MOD_RES (11)..(11): (S)-2-amino-2-methyldec-9-enoic acid
  C-term amino
XDAXDDAAFAXFWA

SEQ ID NO: 181 - protein, 14 aa, Artificial Sequence
  Description of Artificial Sequence: Synthetic peptide
  N-term Acetic Acid
  MOD_RES (1)..(1): (R)-2-allylpyrrolidine-2-carboxylic acid
  MOD_RES (4)..(4): 2-amino-2-(pent-4-en-1-yl)hept-6-enoic acid
  MOD_RES (11)..(11): (S)-2-amino-2-methyldec-9-enoic acid
  C-term amino
XDAXDDAAFAXFWQ

SEQ ID NO: 182 - protein, 13 aa, Artificial Sequence
  Description of Artificial Sequence: Synthetic peptide
  N-term Acetic Acid
  MOD_RES (1)..(1): (R)-2-allylpyrrolidine-2-carboxylic acid
  MOD_RES (4)..(4): 2-amino-2-(pent-4-en-1-yl)hept-6-enoic acid
  MOD_RES (11)..(11): (S)-2-amino-2-methyldec-9-enoic acid
  C-term amino
XDAXDDAAFVXFW

SEQ ID NO: 183 - protein, 14 aa, Artificial Sequence
  Description of Artificial Sequence: Synthetic peptide
  N-term Acetic Acid
  MOD_RES (1)..(1): (R)-2-allylpyrrolidine-2-carboxylic acid
  MOD_RES (4)..(4): 2-amino-2-(pent-4-en-1-yl)hept-6-enoic acid
  MOD_RES (11)..(11): (S)-2-amino-2-methyldec-9-enoic acid
  C-term amino
XDAXDDAAFVXFWA

SEQ ID NO: 184 - protein, 14 aa, Artificial Sequence
  Description of Artificial Sequence: Synthetic peptide
  N-term Acetic Acid
  MOD_RES (1)..(1): (R)-2-allylpyrrolidine-2-carboxylic acid
  MOD_RES (4)..(4): 2-amino-2-(pent-4-en-1-yl)hept-6-enoic acid
  MOD_RES (6)..(6): (S)-2-amino-3-((carboxymethyl)(2,2,2-trifluoroethyl)amino) propanoic acid
  MOD_RES (11)..(11): (S)-2-amino-2-methyldec-9-enoic acid
  MOD_RES (13)..(13): (S)-2-amino-3-(benzo[b]thiophen-3-yl)propanoic acid
  C-term amino
XDAXDXAAFVXFXQ

SEQ ID NO: 185 - protein, 14 aa, Artificial Sequence
  Description of Artificial Sequence: Synthetic peptide
  N-term Acetic Acid
  MOD_RES (1)..(1): (R)-2-allylpyrrolidine-2-carboxylic acid
  MOD_RES (4)..(4): 2-amino-2-(pent-4-en-1-yl)hept-6-enoic acid
  MOD_RES (11)..(11): (S)-2-amino-2-methyldec-9-enoic acid
  MOD_RES (13)..(13): (S)-2-amino-3-(benzo[b]thiophen-3-yl)propanoic acid
  C-term amino
XDAXDDAAFQXFXQ

SEQ ID NO: 186 - protein, 14 aa, Artificial Sequence
  Description of Artificial Sequence: Synthetic peptide
  N-term Acetic Acid
  MOD_RES (1)..(1): (R)-2-allylpyrrolidine-2-carboxylic acid
  MOD_RES (4)..(4): 2-amino-2-(pent-4-en-1-yl)hept-6-enoic acid
  MOD_RES (6)..(6): (S)-2-amino-3-(naphthalen-2-yl)propanoic acid
  MOD_RES (11)..(11): (S)-2-amino-2-methyldec-9-enoic acid
  MOD_RES (13)..(13): (S)-2-amino-3-(benzo[b]thiophen-3-yl)propanoic acid
  C-term amino
XDAXDXAAFQXFXQ

SEQ ID NO: 187 - protein, 14 aa, Artificial Sequence
  Description of Artificial Sequence: Synthetic peptide
  N-term Acetic Acid
  MOD_RES (1)..(1): (R)-2-allylpyrrolidine-2-carboxylic acid
  MOD_RES (4)..(4): 2-amino-2-(pent-4-en-1-yl)hept-6-enoic acid
  MOD_RES (6)..(6): (S)-2-amino-3-(naphthalen-2-yl)propanoic acid
  MOD_RES (11)..(11): (S)-2-amino-2-methyldec-9-enoic acid
  MOD_RES (13)..(13): (S)-2-amino-3-(benzo[b]thiophen-3-yl)propanoic acid
  C-term amino
XDAXDXAAFQXFXA

SEQ ID NO: 188 - protein, 14 aa, Artificial Sequence
  Description of Artificial Sequence: Synthetic peptide
  N-term Acetic Acid
  MOD_RES (1)..(1): (R)-2-allylpyrrolidine-2-carboxylic acid
  MOD_RES (4)..(4): 2-amino-2-(pent-4-en-1-yl)hept-6-enoic acid
  MOD_RES (6)..(6): (S)-2-amino-3-(naphthalen-2-yl)propanoic acid
  MOD_RES (11)..(11): (S)-2-amino-2-methyldec-9-enoic acid
  MOD_RES (13)..(13): (S)-2-amino-3-(benzo[b]thiophen-3-yl)propanoic acid
  C-term amino
XDAXDXAAFVXFXQ

SEQ ID NO: 189 - protein, 14 aa, Artificial Sequence
  Description of Artificial Sequence: Synthetic peptide
  N-term Acetic Acid
  MOD_RES (1)..(1): (R)-2-allylpyrrolidine-2-carboxylic acid
  MOD_RES (4)..(4): 2-amino-2-(pent-4-en-1-yl)hept-6-enoic acid
  MOD_RES (6)..(6): (S)-2-amino-3-(naphthalen-2-yl)propanoic acid
  MOD_RES (11)..(11): (S)-2-amino-2-methyldec-9-enoic acid
  MOD_RES (13)..(13): (S)-2-amino-3-(benzo[b]thiophen-3-yl)propanoic acid
  C-term amino
XDAXDXAAFSXFXQ

SEQ ID NO: 190 - protein, 14 aa, Artificial Sequence
  Description of Artificial Sequence: Synthetic peptide
  N-term Acetic Acid
  MOD_RES (1)..(1): (R)-2-allylpyrrolidine-2-carboxylic acid
  MOD_RES (3)..(3): L-homoserine
  MOD_RES (4)..(4): 2-amino-2-(pent-4-en-1-yl)hept-6-enoic acid
  MOD_RES (11)..(11): (S)-2-amino-2-methyldec-9-enoic acid
  MOD_RES (13)..(13): (S)-2-amino-3-(benzo[b]thiophen-3-yl)propanoic acid
  C-term amino
XDSXDDAAFQXFXA

SEQ ID NO: 191 - protein, 14 aa, Artificial Sequence
  Description of Artificial Sequence: Synthetic peptide
  N-term Acetic Acid
  MOD_RES (1)..(1): (R)-2-allylpyrrolidine-2-carboxylic acid
  MOD_RES (4)..(4): 2-amino-2-(pent-4-en-1-yl)hept-6-enoic acid
  MOD_RES (6)..(6): (S)-2-amino-3-(quinolin-2-yl)propanoic acid
  MOD_RES (11)..(11): (S)-2-amino-2-methyldec-9-enoic acid
  MOD_RES (13)..(13): (S)-2-amino-3-(benzo[b]thiophen-3-yl)propanoic acid
  C-term amino
XDAXDXAAFVXFXQ

SEQ ID NO: 192 - protein, 14 aa, Artificial Sequence
  Description of Artificial Sequence: Synthetic peptide
  N-term Acetic Acid
  MOD_RES (1)..(1): (R)-2-allylpyrrolidine-2-carboxylic acid
  MOD_RES (4)..(4): 2-amino-2-(pent-4-en-1-yl)hept-6-enoic acid
  MOD_RES (6)..(6): (S)-2-amino-4-phenylbutanoic acid
  MOD_RES (11)..(11): (S)-2-amino-2-methyldec-9-enoic acid
  MOD_RES (13)..(13): (S)-2-amino-3-(benzo[b]thiophen-3-yl)propanoic acid
  C-term amino
XDAXDXAAFVXFXQ

SEQ ID NO: 193 - protein, 14 aa, Artificial Sequence
  Description of Artificial Sequence: Synthetic peptide
  N-term Acetic Acid
  MOD_RES (1)..(1): (R)-2-allylpyrrolidine-2-carboxylic acid
  MOD_RES (4)..(4): 2-amino-2-(pent-4-en-1-yl)hept-6-enoic acid
  MOD_RES (11)..(11): (S)-2-amino-2-methyldec-9-enoic acid
  MOD_RES (12)..(12): (S)-2-amino-3-(perfluorophenyl)propanoic acid
  MOD_RES (13)..(13): (S)-2-amino-3-(benzo[b]thiophen-3-yl)propanoic acid
  C-term amino
XDAXDDAAFVXFXQ

SEQ ID NO: 194 - protein, 14 aa, Artificial Sequence
  Description of Artificial Sequence: Synthetic peptide
  N-term Acetic Acid
  MOD_RES (1)..(1): (R)-2-allylpyrrolidine-2-carboxylic acid
  MOD_RES (4)..(4): 2-amino-2-(pent-4-en-1-yl)hept-6-enoic acid
  MOD_RES (6)..(6): (S)-2-amino-3,3-diphenylpropanoic acid
  MOD_RES (11)..(11): (S)-2-amino-2-methyldec-9-enoic acid
  C-term amino
XDAXDXAAFVXFWQ

SEQ ID NO: 195 - protein, 14 aa, Artificial Sequence
  Description of Artificial Sequence: Synthetic peptide
  N-term Acetic Acid
  MOD_RES (1)..(1): (R)-2-allylpyrrolidine-2-carboxylic acid
  MOD_RES (4)..(4): 2-amino-2-(pent-4-en-1-yl)hept-6-enoic acid
  MOD_RES (11)..(11): (S)-2-amino-2-methyldec-9-enoic acid
  C-term amino
XDAXDHAAFVXFWQ

SEQ ID NO: 196 - protein, 14 aa, Artificial Sequence
  Description of Artificial Sequence: Synthetic peptide
  N-term Acetic Acid
  MOD_RES (1)..(1): (R)-2-allylpyrrolidine-2-carboxylic acid
  MOD_RES (4)..(4): 2-amino-2-(pent-4-en-1-yl)hept-6-enoic acid
  MOD_RES (9)..(9): (S)-2-amino-3-(3-chlorophenyl)propanoic acid
  MOD_RES (11)..(11): (S)-2-amino-2-methyldec-9-enoic acid
  C-term amino
XDAXDDAAFVXFWQ

SEQ ID NO: 197 - protein, 14 aa, Artificial Sequence
  Description of Artificial Sequence: Synthetic peptide
  N-term Acetic Acid
  MOD_RES (1)..(1): (R)-2-allylpyrrolidine-2-carboxylic acid
  MOD_RES (4)..(4): 2-amino-2-(pent-4-en-1-yl)hept-6-enoic acid
  MOD_RES (9)..(9): (S)-2-amino-3-(4-chlorophenyl)propanoic acid
  MOD_RES (11)..(11): (S)-2-amino-2-methyldec-9-enoic acid
  C-term amino
XDAXDDAAFVXFWQ

SEQ ID NO: 198 - protein, 14 aa, Artificial Sequence
  Description of Artificial Sequence: Synthetic peptide
  N-term Acetic Acid
  MOD_RES (1)..(1): (R)-2-allylpyrrolidine-2-carboxylic acid
  MOD_RES (4)..(4): 2-amino-2-(pent-4-en-1-yl)hept-6-enoic acid
  MOD_RES (11)..(11): (S)-2-amino-2-methyldec-9-enoic acid
  MOD_RES (12)..(12): (S)-2-amino-3-(3-chlorophenyl)propanoic acid
  C-term amino
XDAXDDAAFVXFWQ

SEQ ID NO: 199 - protein, 14 aa, Artificial Sequence
  Description of Artificial Sequence: Synthetic peptide
  N-term Acetic Acid
  MOD_RES (1)..(1): (R)-2-allylpyrrolidine-2-carboxylic acid
  MOD_RES (4)..(4): 2-amino-2-(pent-4-en-1-yl)hept-6-enoic acid
  MOD_RES (11)..(11): (S)-2-amino-2-methyldec-9-enoic acid
  MOD_RES (12)..(12): (S)-2-amino-3-(4-chlorophenyl)propanoic acid
  C-term amino
XDAXDDAAFVXFWQ

SEQ ID NO: 200 - protein, 14 aa, Artificial Sequence
  Description of Artificial Sequence: Synthetic peptide
  N-term Acetic Acid
  MOD_RES (1)..(1): (R)-2-allylpyrrolidine-2-carboxylic acid
  MOD_RES (4)..(4): 2-amino-2-(pent-4-en-1-yl)hept-6-enoic acid
  MOD_RES (11)..(11): (S)-2-amino-2-methyldec-9-enoic acid
  C-term amino
XHAXDEAAFVXFWQ

SEQ ID NO: 201 - protein, 14 aa, Artificial Sequence
  Description of Artificial Sequence: Synthetic peptide
  N-term Acetic Acid
  MOD_RES (1)..(1): (R)-2-allylpyrrolidine-2-carboxylic acid
  MOD_RES (4)..(4): 2-amino-2-(pent-4-en-1-yl)hept-6-enoic acid
  MOD_RES (11)..(11): (S)-2-amino-2-methyldec-9-enoic acid
  C-term amino
XDAXDDAAFQXFWA

SEQ ID NO: 202 - protein, 14 aa, Artificial Sequence
  Description of Artificial Sequence: Synthetic peptide
  N-term Acetic Acid
  MOD_RES (1)..(1): (R)-2-allylpyrrolidine-2-carboxylic acid
  MOD_RES (4)..(4): 2-amino-2-(pent-4-en-1-yl)hept-6-enoic acid
  MOD_RES (9)..(9): (S)-2-amino-3-(2-fluorophenyl)propanoic acid
  MOD_RES (11)..(11): (S)-2-amino-2-methyldec-9-enoic acid
  C-term amino
XDAXDDAAFVXFWQ

SEQ ID NO: 203 - protein, 14 aa, Artificial Sequence
  Description of Artificial Sequence: Synthetic peptide
  N-term Acetic Acid
  MOD_RES (1)..(1): (R)-2-allylpyrrolidine-2-carboxylic acid
  MOD_RES (4)..(4): 2-amino-2-(pent-4-en-1-yl)hept-6-enoic acid
  MOD_RES (11)..(11): (S)-2-amino-2-methyldec-9-enoic acid
  MOD_RES (12)..(12): (S)-2-amino-3-(2-fluorophenyl)propanoic acid
  C-term amino
XDAXDDAAFVXFWQ

SEQ ID NO: 204 - protein, 14 aa, Artificial Sequence
  Description of Artificial Sequence: Synthetic peptide
  N-term Acetic Acid
  MOD_RES (1)..(1): (R)-2-allylpyrrolidine-2-carboxylic acid
  MOD_RES (4)..(4): 2-amino-2-(pent-4-en-1-yl)hept-6-enoic acid
  MOD_RES (11)..(11): (S)-2-amino-2-methyldec-9-enoic acid
  C-term amino
XDAXDDAAHVXFWQ

SEQ ID NO: 205 - protein, 14 aa, Artificial Sequence
  Description of Artificial Sequence: Synthetic peptide
  N-term Acetic Acid
  MOD_RES (1)..(1): (R)-2-allylpyrrolidine-2-carboxylic acid
  MOD_RES (4)..(4): 2-amino-2-(pent-4-en-1-yl)hept-6-enoic acid
  MOD_RES (9)..(9): (S)-2-amino-3-(4-aminophenyl)propanoic acid
  MOD_RES (11)..(11): (S)-2-amino-2-methyldec-9-enoic acid
  C-term amino
XDAXDDAAXVXFWQ

SEQ ID NO: 206 - protein, 14 aa, Artificial Sequence
  Description of Artificial Sequence: Synthetic peptide
  N-term Acetic Acid
  MOD_RES (1)..(1): (R)-2-allylpyrrolidine-2-carboxylic acid
  MOD_RES (4)..(4): 2-amino-2-(pent-4-en-1-yl)hept-6-enoic acid
  MOD_RES (6)..(6): (S)-2-amino-3-(4-aminophenyl)propanoic acid
  MOD_RES (11)..(11): (S)-2-amino-2-methyldec-9-enoic acid
  C-term amino
XDAXDXAAFVXFWQ

SEQ ID NO: 207 - protein, 14 aa, Artificial Sequence
  Description of Artificial Sequence: Synthetic peptide
  N-term Acetic Acid
  MOD_RES (1)..(1): (R)-2-allylpyrrolidine-2-carboxylic acid
  MOD_RES (4)..(4): 2-amino-2-(pent-4-en-1-yl)hept-6-enoic acid
  MOD_RES (9)..(9): (S)-2-amino-3-(thiophen-2-yl)propanoic acid
  MOD_RES (11)..(11): (S)-2-amino-2-methyldec-9-enoic acid
  C-term amino
XDAXDDAAXVXFWQ

SEQ ID NO: 208 - protein, 14 aa, Artificial Sequence
  Description of Artificial Sequence: Synthetic peptide
  N-term Acetic Acid
  MOD_RES (1)..(1): (R)-2-allylpyrrolidine-2-carboxylic acid
  MOD_RES (4)..(4): 2-amino-2-(pent-4-en-1-yl)hept-6-enoic acid
  MOD_RES (9)..(9): (S)-2-amino-3-(thiophen-3-yl)propanoic acid
  MOD_RES (11)..(11): (S)-2-amino-2-methyldec-9-enoic acid
  C-term amino
XDAXDDAAXVXFWQ

SEQ ID NO: 209 - protein, 14 aa, Artificial Sequence
  Description of Artificial Sequence: Synthetic peptide
  N-term Acetic Acid
  MOD_RES (1)..(1): (R)-2-allylpyrrolidine-2-carboxylic acid
  MOD_RES (4)..(4): 2-amino-2-(pent-4-en-1-yl)hept-6-enoic acid
  MOD_RES (9)..(9): (S)-2-amino-3-(furan-2-yl)propanoic acid
  MOD_RES (11)..(11): (S)-2-amino-2-methyldec-9-enoic acid
  C-term amino
XDAXDDAAXVXFWQ

SEQ ID NO: 210 - protein, 14 aa, Artificial Sequence
  Description of Artificial Sequence: Synthetic peptide
  N-term Acetic Acid
  MOD_RES (1)..(1): (R)-2-allylpyrrolidine-2-carboxylic acid
  MOD_RES (4)..(4): 2-amino-2-(pent-4-en-1-yl)hept-6-enoic acid
  MOD_RES (9)..(9): Nt-methyl-L-histidine
  MOD_RES (11)..(11): (S)-2-amino-2-methyldec-9-enoic acid
  C-term amino
XDAXDDAAHVXFWQ

SEQ ID NO: 211 - protein, 14 aa, Artificial Sequence
  Description of Artificial Sequence: Synthetic peptide
  N-term Acetic Acid
  MOD_RES (1)..(1): (R)-2-allylpyrrolidine-2-carboxylic acid
  MOD_RES (4)..(4): 2-amino-2-(pent-4-en-1-yl)hept-6-enoic acid
  MOD_RES (9)..(9): Np-methyl-D-histidine
  MOD_RES (11)..(11): (S)-2-amino-2-methyldec-9-enoic acid
  C-term amino
XDAXDDAAHVXFWQ

SEQ ID NO: 212 - protein, 14 aa, Artificial Sequence
  Description of Artificial Sequence: Synthetic peptide
  N-term Acetic Acid
  MOD_RES (1)..(1): (R)-2-allylpyrrolidine-2-carboxylic acid
  MOD_RES (4)..(4): 2-amino-2-(pent-4-en-1-yl)hept-6-enoic acid
  MOD_RES (11)..(11): (S)-2-amino-2-methyldec-9-enoic acid
  MOD_RES (13)..(13): 1-formyl-L-tryptophan
  C-term amino
XDAXDDAAFSXFWS

SEQ ID NO: 213 - protein, 14 aa, Artificial Sequence
  Description of Artificial Sequence: Synthetic peptide
  N-term Acetic Acid
  MOD_RES (1)..(1): (R)-2-allylpyrrolidine-2-carboxylic acid
  MOD_RES (4)..(4): 2-amino-2-(pent-4-en-1-yl)hept-6-enoic acid
  MOD_RES (11)..(11): (S)-2-amino-2-methyldec-9-enoic acid
  MOD_RES (13)..(13): 1-formyl-L-tryptophan
  C-term amino
XDAXDDAAFVXFWS

SEQ ID NO: 214 - protein, 14 aa, Artificial Sequence
  Description of Artificial Sequence: Synthetic peptide
  N-term Acetic Acid
  MOD_RES (1)..(1): (R)-2-allylpyrrolidine-2-carboxylic acid
  MOD_RES (4)..(4): 2-amino-2-(pent-4-en-1-yl)hept-6-enoic acid
  MOD_RES (11)..(11): (S)-2-amino-2-methyldec-9-enoic acid
  MOD_RES (12)..(12): (S)-2-amino-3-(2-carbamoylphenyl)propanoic acid
  MOD_RES (13)..(13): (S)-2-amino-3-(benzo[b]thiophen-3-yl)propanoic acid
  C-term amino
XDAXDDAAFVXFXQ

SEQ ID NO: 215 - protein, 14 aa, Artificial Sequence
  Description of Artificial Sequence: Synthetic peptide
  N-term Acetic Acid
  MOD_RES (1)..(1): (R)-2-allylpyrrolidine-2-carboxylic acid
  MOD_RES (4)..(4): 2-amino-2-(pent-4-en-1-yl)hept-6-enoic acid
  MOD_RES (11)..(11): (S)-2-amino-2-methyldec-9-enoic acid
  MOD_RES (12)..(12): (S)-2-amino-3-(4-carbamoylphenyl)propanoic acid
  MOD_RES (13)..(13): (S)-2-amino-3-(benzo[b]thiophen-3-yl)propanoic acid
  C-term amino
XDAXDDAAFVXFXQ

SEQ ID NO: 216 - protein, 14 aa, Artificial Sequence
  Description of Artificial Sequence: Synthetic peptide
  N-term Acetic Acid
  MOD_RES (1)..(1): (R)-2-allylpyrrolidine-2-carboxylic acid
  MOD_RES (4)..(4): 2-amino-2-(pent-4-en-1-yl)hept-6-enoic acid
  MOD_RES (11)..(11): (S)-2-amino-2-methyldec-9-enoic acid
  MOD_RES (12)..(12): (S)-4-(2-amino-2-carboxyethyl)benzoic acid
  MOD_RES (13)..(13): (S)-2-amino-3-(benzo[b]thiophen-3-yl)propanoic acid
  C-term amino
XDAXDDAAFVXXXQ

SEQ ID NO: 217 - protein, 14 aa, Artificial Sequence
  Description of Artificial Sequence: Synthetic peptide
  N-term Acetic Acid
  MOD_RES (1)..(1): (R)-2-allylpyrrolidine-2-carboxylic acid
  MOD_RES (4)..(4): 2-amino-2-(pent-4-en-1-yl)hept-6-enoic acid
  MOD_RES (11)..(11): (S)-2-amino-2-methyldec-9-enoic acid
  MOD_RES (13)..(13): (S)-2-amino-3-(benzo[b]thiophen-3-yl)propanoic acid
  C-term amino
XDAXDDAAFVXYXQ

SEQ ID NO: 218 - protein, 14 aa, Artificial Sequence
  Description of Artificial Sequence: Synthetic peptide
  N-term Acetic Acid
  MOD_RES (1)..(1): (R)-2-allylpyrrolidine-2-carboxylic acid
  MOD_RES (4)..(4): 2-amino-2-(pent-4-en-1-yl)hept-6-enoic acid
  MOD_RES (11)..(11): (S)-2-amino-2-methyldec-9-enoic acid
  MOD_RES (13)..(13): (S)-2-amino-3-(benzo[b]thiophen-3-yl)propanoic acid
  C-term amino
XDAXDDAAFTXFXQ

SEQ ID NO: 219 - protein, 14 aa, Artificial Sequence
  Description of Artificial Sequence: Synthetic peptide
  N-term Acetic Acid
  MOD_RES (1)..(1): (R)-2-allylpyrrolidine-2-carboxylic acid
  MOD_RES (4)..(4): 2-amino-2-(pent-4-en-1-yl)hept-6-enoic acid
  MOD_RES (11)..(11): (S)-2-amino-2-methyldec-9-enoic acid
  MOD_RES (13)..(13): (S)-2-amino-3-(benzo[b]thiophen-3-yl)propanoic acid
  C-term amino
XDAXDDAAFNXFXQ

SEQ ID NO: 220 - protein, 14 aa, Artificial Sequence
  Description of Artificial Sequence: Synthetic peptide
  N-term Acetic Acid
  MOD_RES (1)..(1): (R)-2-allylpyrrolidine-2-carboxylic acid
  MOD_RES (3)..(3): O-methyl-L-serine
  MOD_RES (4)..(4): 2-amino-2-(pent-4-en-1-yl)hept-6-enoic acid
  MOD_RES (11)..(11): (S)-2-amino-2-methyldec-9-enoic acid
  MOD_RES (13)..(13): (S)-2-amino-3-(benzo[b]thiophen-3-yl)propanoic acid
  C-term amino
XDSXDDAAFVXFXQ

SEQ ID NO: 221 - protein, 14 aa, Artificial Sequence
  Description of Artificial Sequence: Synthetic peptide
  N-term Acetic Acid
  MOD_RES (1)..(1): (R)-2-allylpyrrolidine-2-carboxylic acid
  MOD_RES (4)..(4): 2-amino-2-(pent-4-en-1-yl)hept-6-enoic acid
  MOD_RES (11)..(11): (S)-2-amino-2-methyldec-9-enoic acid
  MOD_RES (13)..(13): (S)-2-amino-3-(benzo[b]thiophen-3-yl)propanoic acid
  C-term amino
XDQXDDAAFVXFXQ

SEQ ID NO: 222 - protein, 14 aa, Artificial Sequence
  Description of Artificial Sequence: Synthetic peptide
  N-term Acetic Acid
  MOD_RES (1)..(1): (R)-2-allylpyrrolidine-2-carboxylic acid
  MOD_RES (4)..(4): 2-amino-2-(pent-4-en-1-yl)hept-6-enoic acid
  MOD_RES (11)..(11): (S)-2-amino-2-methyldec-9-enoic acid
  C-term amino
XAAXDDAAFVXFWQ

SEQ ID NO: 223 - protein, 14 aa, Artificial Sequence
  Description of Artificial Sequence: Synthetic peptide
  N-term Acetic Acid
  MOD_RES (1)..(1): (R)-2-allylpyrrolidine-2-carboxylic acid
  MOD_RES (4)..(4): 2-amino-2-(pent-4-en-1-yl)hept-6-enoic acid
  MOD_RES (11)..(11): (S)-2-amino-2-methyldec-9-enoic acid
  C-term amino
XDAXADAAFVXFWQ

SEQ ID NO: 224 - protein, 14 aa, Artificial Sequence
  Description of Artificial Sequence: Synthetic peptide
  N-term Acetic Acid
  MOD_RES (1)..(1): (R)-2-allylpyrrolidine-2-carboxylic acid
  MOD_RES (4)..(4): 2-amino-2-(pent-4-en-1-yl)hept-6-enoic acid
  MOD_RES (11)..(11): (S)-2-amino-2-methyldec-9-enoic acid
  C-term amino
XDAXDAAAFVXFWQ

SEQ ID NO: 225 - protein, 14 aa, Artificial Sequence
  Description of Artificial Sequence: Synthetic peptide
  N-term Acetic Acid
  MOD_RES (1)..(1): (R)-2-allylpyrrolidine-2-carboxylic acid
  MOD_RES (4)..(4): 2-amino-2-(pent-4-en-1-yl)hept-6-enoic acid
  MOD_RES (11)..(11): (S)-2-amino-2-methyldec-9-enoic acid
  C-term amino
XDAXDDAAAVXFWQ

SEQ ID NO: 226 - protein, 14 aa, Artificial Sequence
  Description of Artificial Sequence: Synthetic peptide
  N-term Acetic Acid
  MOD_RES (1)..(1): (R)-2-allylpyrrolidine-2-carboxylic acid
  MOD_RES (4)..(4): 2-amino-2-(pent-4-en-1-yl)hept-6-enoic acid
  MOD_RES (11)..(11): (S)-2-amino-2-methyldec-9-enoic acid
  C-term amino
XDAXDDAAFVXAWQ

SEQ ID NO: 227 - protein, 14 aa, Artificial Sequence
  Description of Artificial Sequence: Synthetic peptide
  N-term Acetic Acid
  MOD_RES (1)..(1): (R)-2-allylpyrrolidine-2-carboxylic acid
  MOD_RES (4)..(4): 2-amino-2-(pent-4-en-1-yl)hept-6-enoic acid
  MOD_RES (11)..(11): (S)-2-amino-2-methyldec-9-enoic acid
  C-term amino
XDAXDDAAFVXFAQ

SEQ ID NO: 228 - protein, 14 aa, Artificial Sequence
  Description of Artificial Sequence: Synthetic peptide
  N-term Acetic Acid
  MOD_RES (1)..(1): (R)-2-allylpyrrolidine-2-carboxylic acid
  MOD_RES (4)..(4): 2-amino-2-(pent-4-en-1-yl)hept-6-enoic acid
  MOD_RES (11)..(11): (S)-2-amino-2-methyldec-9-enoic acid
  MOD_RES (12)..(12): (S)-2-amino-3-(4-cyanophenyl)propanoic acid
  MOD_RES (13)..(13): (S)-2-amino-3-(benzo[b]thiophen-3-yl)propanoic acid
  C-term amino
XDAXDDAAFVXFXQ

SEQ ID NO: 229 - protein, 14 aa, Artificial Sequence
  Description of Artificial Sequence: Synthetic peptide
  N-term Acetic Acid
  MOD_RES (1)..(1): (R)-2-allylpyrrolidine-2-carboxylic acid
  MOD_RES (4)..(4): 2-amino-2-(pent-4-en-1-yl)hept-6-enoic acid
  MOD_RES (11)..(11): (S)-2-amino-2-methyldec-9-enoic acid
  MOD_RES (13)..(13): (S)-2-amino-3-(benzo[b]thiophen-3-yl)propanoic acid
  C-term amino
XDAXDDAAFQXFXH

SEQ ID NO: 230 - protein, 14 aa, Artificial Sequence
  Description of Artificial Sequence: Synthetic peptide
  N-term Acetic Acid
  MOD_RES (1)..(1): (R)-2-allylpyrrolidine-2-carboxylic acid
  MOD_RES (4)..(4): 2-amino-2-(pent-4-en-1-yl)hept-6-enoic acid
  MOD_RES (11)..(11): (S)-2-amino-2-methyldec-9-enoic acid
  MOD_RES (13)..(13): (S)-2-amino-3-(benzo[b]thiophen-3-yl)propanoic acid
  C-term amino
XDAXDDAAFAXHXQ

SEQ ID NO: 231 - protein, 14 aa, Artificial Sequence
  Description of Artificial Sequence: Synthetic peptide
  N-term Acetic Acid
  MOD_RES (1)..(1): (R)-2-allylpyrrolidine-2-carboxylic acid
  MOD_RES (4)..(4): 2-amino-2-(pent-4-en-1-yl)hept-6-enoic acid
  MOD_RES (11)..(11): (S)-2-amino-2-methyldec-9-enoic acid
  MOD_RES (13)..(13): (S)-2-amino-3-(benzo[b]thiophen-3-yl)propanoic acid
  C-term amino
XDAXDDAAHAXFXQ

SEQ ID NO: 232 - protein, 14 aa, Artificial Sequence
  Description of Artificial Sequence: Synthetic peptide
  N-term Acetic Acid
  MOD_RES (1)..(1): (R)-2-allylpyrrolidine-2-carboxylic acid
  MOD_RES (4)..(4): 2-amino-2-(pent-4-en-1-yl)hept-6-enoic acid
  MOD_RES (9)..(9): (S)-2-amino-3-(o-tolyl)propanoic acid
  MOD_RES (11)..(11): (S)-2-amino-2-methyldec-9-enoic acid
  MOD_RES (13)..(13): (S)-2-amino-3-(benzo[b]thiophen-3-yl)propanoic acid
  C-term amino
XDAXDDAAXAXFXQ

SEQ ID NO: 233 - protein, 14 aa, Artificial Sequence
  Description of Artificial Sequence: Synthetic peptide
  N-term Acetic Acid
  MOD_RES (1)..(1): (R)-2-allylpyrrolidine-2-carboxylic acid
  MOD_RES (4)..(4): 2-amino-2-(pent-4-en-1-yl)hept-6-enoic acid
  MOD_RES (11)..(11): (S)-2-amino-2-methyldec-9-enoic acid
  MOD_RES (12)..(12): (S)-2-amino-3-(o-tolyl)propanoic acid
  MOD_RES (13)..(13): (S)-2-amino-3-(benzo[b]thiophen-3-yl)propanoic acid
  C-term amino
XDAXDDAAFAXXXQ

SEQ ID NO: 234 - protein, 14 aa, Artificial Sequence
  Description of Artificial Sequence: Synthetic peptide
  N-term Acetic Acid
  MOD_RES (1)..(1): (R)-2-allylpyrrolidine-2-carboxylic acid
  MOD_RES (4)..(4): 2-amino-2-(pent-4-en-1-yl)hept-6-enoic acid
  MOD_RES (11)..(11): (S)-2-amino-2-methyldec-9-enoic acid
  MOD_RES (13)..(13): (S)-2-amino-3-(7-fluoronaphthalen-1-yl)propanoic acid
  C-term amino
XDAXDDAAFVXFXQ

SEQ ID NO: 235 - protein, 14 aa, Artificial Sequence
  Description of Artificial Sequence: Synthetic peptide
  N-term Acetic Acid
  MOD_RES (1)..(1): (R)-2-allylpyrrolidine-2-carboxylic acid
  MOD_RES (4)..(4): 2-amino-2-(pent-4-en-1-yl)hept-6-enoic acid
  MOD_RES (11)..(11): (S)-2-amino-2-methyldec-9-enoic acid
  MOD_RES (12)..(12): (S)-2-amino-3-(p-tolyl)propanoic acid
  MOD_RES (13)..(13): (S)-2-amino-3-(benzo[b]thiophen-3-yl)propanoic acid
  C-term amino
XDAXDDAAFAXXXQ

SEQ ID NO: 236 - protein, 14 aa, Artificial Sequence
  Description of Artificial Sequence: Synthetic peptide
  N-term Acetic Acid
  MOD_RES (1)..(1): (R)-2-allylpyrrolidine-2-carboxylic acid
  MOD_RES (4)..(4): 2-amino-2-(pent-4-en-1-yl)hept-6-enoic acid
  MOD_RES (9)..(9): (S)-2-amino-3-(naphthalen-2-yl)propanoic acid
  MOD_RES (11)..(11): (S)-2-amino-2-methyldec-9-enoic acid
  MOD_RES (13)..(13): (S)-2-amino-3-(benzo[b]thiophen-3-yl)propanoic acid
  C-term amino
XDAXDDAAXAXFXQ

SEQ ID NO: 237 - protein, 14 aa, Artificial Sequence
  Description of Artificial Sequence: Synthetic peptide
  N-term Acetic Acid
  MOD_RES (1)..(1): (R)-2-allylpyrrolidine-2-carboxylic acid
  MOD_RES (4)..(4): 2-amino-2-(pent-4-en-1-yl)hept-6-enoic acid
  MOD_RES (11)..(11): (S)-2-amino-2-methyldec-9-enoic acid
  MOD_RES (12)..(12): (S)-2-amino-3-(3-fluorophenyl)propanoic acid
  MOD_RES (13)..(13): (S)-2-amino-3-(benzo[b]thiophen-3-yl)propanoic acid
  C-term amino
XDAXDDAAFAXFXQ

SEQ ID NO: 238 - protein, 14 aa, Artificial Sequence
  Description of Artificial Sequence: Synthetic peptide
  N-term Acetic Acid
  MOD_RES (1)..(1): (R)-2-allylpyrrolidine-2-carboxylic acid
  MOD_RES (4)..(4): 2-amino-2-(pent-4-en-1-yl)hept-6-enoic acid
  MOD_RES (11)..(11): (S)-2-amino-2-methyldec-9-enoic acid
  MOD_RES (12)..(12): (S)-2-amino-3-(3-fluorophenyl)propanoic acid
  MOD_RES (13)..(13): (S)-2-amino-3-(benzo[b]thiophen-3-yl)propanoic acid
  C-term amino
XDAXDEAAFAXFXQ

SEQ ID NO: 239 - protein, 14 aa, Artificial Sequence
  Description of Artificial Sequence: Synthetic peptide
  N-term Acetic Acid
  MOD_RES (1)..(1): (R)-2-allylpyrrolidine-2-carboxylic acid
  MOD_RES (4)..(4): 2-amino-2-(pent-4-en-1-yl)hept-6-enoic acid
  MOD_RES (9)..(9): (S)-2-amino-3-(3-(trifluoromethyl)phenyl)propanoic acid
  MOD_RES (11)..(11): (S)-2-amino-2-methyldec-9-enoic acid
  MOD_RES (13)..(13): (S)-2-amino-3-(benzo[b]thiophen-3-yl)propanoic acid
  C-term amino
XDAXDDAAFVXFXQ

SEQ ID NO: 240 - protein, 14 aa, Artificial Sequence
  Description of Artificial Sequence: Synthetic peptide
  N-term Acetic Acid
  MOD_RES (1)..(1): (R)-2-allylpyrrolidine-2-carboxylic acid
  MOD_RES (4)..(4): 2-amino-2-(pent-4-en-1-yl)hept-6-enoic acid
  MOD_RES (9)..(9): (S)-2-amino-3-(3-(trifluoromethyl)phenyl)propanoic acid
  MOD_RES (11)..(11): (S)-2-amino-2-methyldec-9-enoic acid
  MOD_RES (13)..(13): (S)-2-amino-3-(benzo[b]thiophen-3-yl)propanoic acid
  C-term amino
XDAXDDAAFAXFXQ

SEQ ID NO: 241 - protein, 14 aa, Artificial Sequence
  Description of Artificial Sequence: Synthetic peptide
  N-term Acetic Acid
  MOD_RES (1)..(1): (R)-2-allylpyrrolidine-2-carboxylic acid
  MOD_RES (4)..(4): 2-amino-2-(pent-4-en-1-yl)hept-6-enoic acid
  MOD_RES (9)..(9): (S)-2-amino-3-(3-(trifluoromethyl)phenyl)propanoic acid
  MOD_RES (11)..(11): (S)-2-amino-2-methyldec-9-enoic acid
  MOD_RES (13)..(13): (S)-2-amino-3-(benzo[b]thiophen-3-yl)propanoic acid
  C-term amino
XDAXDDAAFQXFXQ

SEQ ID NO: 242 - protein, 14 aa, Artificial Sequence
  Description of Artificial Sequence: Synthetic peptide
  N-term Acetic Acid
  MOD_RES (1)..(1): (R)-2-allylpyrrolidine-2-carboxylic acid
  MOD_RES (4)..(4): 2-amino-2-(pent-4-en-1-yl)hept-6-enoic acid
  MOD_RES (11)..(11): (S)-2-amino-2-methyldec-9-enoic acid
  MOD_RES (12)..(12): (S)-2-amino-3-(3-fluorophenyl)propanoic acid
  MOD_RES (13)..(13): (S)-2-amino-3-(benzo[b]thiophen-3-yl)propanoic acid
  C-term amino
XDAXDNAAFVXFXQ

SEQ ID NO: 243 - protein, 14 aa, Artificial Sequence
  Description of Artificial Sequence: Synthetic peptide
  N-term Acetic Acid
  MOD_RES (1)..(1): (R)-2-allylpyrrolidine-2-carboxylic acid
  MOD_RES (4)..(4): 2-amino-2-(pent-4-en-1-yl)hept-6-enoic acid
  MOD_RES (11)..(11): (S)-2-amino-2-methyldec-9-enoic acid
  MOD_RES (12)..(12): (S)-2-amino-3-(pyridin-2-yl)propanoic acid
  MOD_RES (13)..(13): (S)-2-amino-3-(benzo[b]thiophen-3-yl)propanoic acid
  C-term amino
XDAXDEAAFVXXXQ

SEQ ID NO: 244 - protein, 14 aa, Artificial Sequence
  Description of Artificial Sequence: Synthetic peptide
  N-term Acetic Acid
  MOD_RES (1)..(1): (R)-2-allylpyrrolidine-2-carboxylic acid
  MOD_RES (4)..(4): 2-amino-2-(pent-4-en-1-yl)hept-6-enoic acid
  MOD_RES (11)..(11): (S)-2-amino-2-methyldec-9-enoic acid
  MOD_RES (12)..(12): (S)-2-amino-3-(pyridin-4-yl)propanoic acid
  MOD_RES (13)..(13): (S)-2-amino-3-(benzo[b]thiophen-3-yl)propanoic acid
  C-term amino
XDAXDEAAFVXXXQ

SEQ ID NO: 245 - protein, 14 aa, Artificial Sequence
  Description of Artificial Sequence: Synthetic peptide
  N-term Acetic Acid
  MOD_RES (1)..(1): (R)-2-allylpyrrolidine-2-carboxylic acid
  MOD_RES (4)..(4): 2-amino-2-(pent-4-en-1-yl)hept-6-enoic acid
  MOD_RES (9)..(9): (S)-2-amino-3-(pyridin-2-yl)propanoic acid
  MOD_RES (11)..(11): (S)-2-amino-2-methyldec-9-enoic acid
  MOD_RES (13)..(13): (S)-2-amino-3-(benzo[b]thiophen-3-yl)propanoic acid
  C-term amino
XDAXDEAAXVXFXQ

SEQ ID NO: 246 - protein, 14 aa, Artificial Sequence
  Description of Artificial Sequence: Synthetic peptide
  N-term Acetic Acid
  MOD_RES (1)..(1): (R)-2-allylpyrrolidine-2-carboxylic acid
  MOD_RES (4)..(4): 2-amino-2-(pent-4-en-1-yl)hept-6-enoic acid
  MOD_RES (11)..(11): (S)-2-amino-2-methyldec-9-enoic acid
  MOD_RES (12)..(12): (S)-2-amino-3-(2,3-difluorophenyl)propanoic acid
  MOD_RES (13)..(13): (S)-2-amino-3-(benzo[b]thiophen-3-yl)propanoic acid
  C-term amino
XDAXDEAAFVXFXQ

SEQ ID NO: 247 - protein, 14 aa, Artificial Sequence
  Description of Artificial Sequence: Synthetic peptide
  N-term Acetic Acid
  MOD_RES (1)..(1): (R)-2-allylpyrrolidine-2-carboxylic acid
  MOD_RES (4)..(4): 2-amino-2-(pent-4-en-1-yl)hept-6-enoic acid
  MOD_RES (9)..(9): (S)-2-amino-3-(2,3-difluorophenyl)propanoic acid
  MOD_RES (11)..(11): (S)-2-amino-2-methyldec-9-enoic acid
  MOD_RES (13)..(13): (S)-2-amino-3-(benzo[b]thiophen-3-yl)propanoic acid
  C-term amino
XDAXDEAAFVXFXQ

SEQ ID NO: 248 - protein, 14 aa, Artificial Sequence
  Description of Artificial Sequence: Synthetic peptide
  N-term Acetic Acid
  MOD_RES (1)..(1): (R)-2-allylpyrrolidine-2-carboxylic acid
  MOD_RES (4)..(4): 2-amino-2-(pent-4-en-1-yl)hept-6-enoic acid
  MOD_RES (9)..(9): (S)-2-amino-3-cyclopentylpropanoic acid
  MOD_RES (11)..(11): (S)-2-amino-2-methyldec-9-enoic acid
  MOD_RES (13)..(13): (S)-2-amino-3-(benzo[b]thiophen-3-yl)propanoic acid
  C-term amino
XDAXDEAAXVXFXQ

SEQ ID NO: 249 - protein, 14 aa, Artificial Sequence
  Description of Artificial Sequence: Synthetic peptide
  N-term Acetic Acid
  MOD_RES (1)..(1): (R)-2-allylpyrrolidine-2-carboxylic acid
  MOD_RES (4)..(4): 2-amino-2-(pent-4-en-1-yl)hept-6-enoic acid
  MOD_RES (11)..(11): (S)-2-amino-2-methyldec-9-enoic acid
  MOD_RES (12)..(12): (S)-2-amino-3-cyclopentylpropanoic acid
  MOD_RES (13)..(13): (S)-2-amino-3-(benzo[b]thiophen-3-yl)propanoic acid
  C-term amino
XDAXDEAAFVXXXQ

SEQ ID NO: 250 - protein, 14 aa, Artificial Sequence
  Description of Artificial Sequence: Synthetic peptide
  N-term Acetic Acid
  MOD_RES (1)..(1): (R)-2-allylpyrrolidine-2-carboxylic acid
  MOD_RES (4)..(4): 2-amino-2-(pent-4-en-1-yl)hept-6-enoic acid
  MOD_RES (11)..(11): (S)-2-amino-2-methyldec-9-enoic acid
  MOD_RES (12)..(12): (S)-2-amino-3-(3,5-difluorophenyl)propanoic acid
  MOD_RES (13)..(13): (S)-2-amino-3-(benzo[b]thiophen-3-yl)propanoic acid
  C-term amino
XDAXDEAAFVXFXQ

SEQ ID NO: 251 - protein, 14 aa, Artificial Sequence
  Description of Artificial Sequence: Synthetic peptide
  N-term Acetic Acid
  MOD_RES (1)..(1): (R)-2-allylpyrrolidine-2-carboxylic acid
  MOD_RES (4)..(4): 2-amino-2-(pent-4-en-1-yl)hept-6-enoic acid
  MOD_RES (11)..(11): (S)-2-amino-2-methyldec-9-enoic acid
  MOD_RES (12)..(12): (S)-2-amino-3-(m-tolyl)propanoic acid
  MOD_RES (13)..(13): (S)-2-amino-3-(benzo[b]thiophen-3-yl)propanoic acid
  C-term amino
XDAXDEAAFVXXXQ

SEQ ID NO: 252 - protein, 14 aa, Artificial Sequence
  Description of Artificial Sequence: Synthetic peptide
  N-term Acetic Acid
  MOD_RES (1)..(1): (R)-2-allylpyrrolidine-2-carboxylic acid
  MOD_RES (4)..(4): 2-amino-2-(pent-4-en-1-yl)hept-6-enoic acid
  MOD_RES (11)..(11): (S)-2-amino-2-methyldec-9-enoic acid
  MOD_RES (12)..(12): (S)-2-amino-3-(3-fluorophenyl)propanoic acid
  MOD_RES (13)..(13): (S)-2-amino-3-(benzo[b]thiophen-3-yl)propanoic acid
  C-term amino
XDAXDHAAFVXFXQ

SEQ ID NO: 253 - protein, 14 aa, Artificial Sequence
  Description of Artificial Sequence: Synthetic peptide
  N-term Acetic Acid
  MOD_RES (1)..(1): (R)-2-allylpyrrolidine-2-carboxylic acid
  MOD_RES (4)..(4): 2-amino-2-(pent-4-en-1-yl)hept-6-enoic acid
  MOD_RES (11)..(11): (S)-5-(((allyloxy)carbonyl)(methyl)amino)-2-amino-2- methylpentanoic acid
  MOD_RES (12)..(12): (S)-2-amino-3-(3-fluorophenyl)propanoic acid
  MOD_RES (13)..(13): (S)-2-amino-3-(benzo[b]thiophen-3-yl)propanoic acid
  C-term amino
XDAXDHAAFVXFXQ

SEQ ID NO: 254 - protein, 14 aa, Artificial Sequence
  Description of Artificial Sequence: Synthetic peptide
  N-term Acetic Acid
  MOD_RES (1)..(1): (R)-2-allylpyrrolidine-2-carboxylic acid
  MOD_RES (4)..(4): 2-amino-2-(pent-4-en-1-yl)hept-6-enoic acid
  MOD_RES (11)..(11): (S)-2-amino-2-methyldec-9-enoic acid
  MOD_RES (12)..(12): (S)-2-amino-3-(3-fluorophenyl)propanoic acid
  MOD_RES (13)..(13): (S)-2-amino-3-(benzo[b]thiophen-3-yl)propanoic acid
  C-term amino
XDAXDHAAFQXFXQ

SEQ ID NO: 255 - protein, 14 aa, Artificial Sequence
  Description of Artificial Sequence: Synthetic peptide
  N-term Acetic Acid
  MOD_RES (1)..(1): (R)-2-allylpyrrolidine-2-carboxylic acid
  MOD_RES (4)..(4): 2-amino-2-(pent-4-en-1-yl)hept-6-enoic acid
  MOD_RES (11)..(11): (S)-5-(((allyloxy)carbonyl)(methyl)amino)-2-amino-2- methylpentanoic acid
  MOD_RES (12)..(12): (S)-2-amino-3-(3-fluorophenyl)propanoic acid
  MOD_RES (13)..(13): (S)-2-amino-3-(benzo[b]thiophen-3-yl)propanoic acid
  C-term amino
XDAXDHAAFQXFXQ

SEQ ID NO: 256 - protein, 14 aa, Artificial Sequence
  Description of Artificial Sequence: Synthetic peptide
  N-term Acetic Acid
  MOD_RES (1)..(1): (R)-2-allylpyrrolidine-2-carboxylic acid
  MOD_RES (4)..(4): 2-amino-2-(pent-4-en-1-yl)hept-6-enoic acid
  MOD_RES (9)..(9): (S)-2-amino-3-(thiophen-2-yl)propanoic acid
  MOD_RES (11)..(11): (S)-2-amino-2-methyldec-9-enoic acid
  MOD_RES (12)..(12): (S)-2-amino-3-(3-fluorophenyl)propanoic acid
  MOD_RES (13)..(13): (S)-2-amino-3-(benzo[b]thiophen-3-yl)propanoic acid
  C-term amino
XDAXDEAAXQXFXQ

SEQ ID NO: 257 - protein, 14 aa, Artificial Sequence
  Description of Artificial Sequence: Synthetic peptide
  N-term Acetic Acid
  MOD_RES (1)..(1): (R)-2-allylpyrrolidine-2-carboxylic acid
  MOD_RES (4)..(4): 2-amino-2-(pent-4-en-1-yl)hept-6-enoic acid
  MOD_RES (6)..(6): (S)-2-amino-3-(thiophen-2-yl)propanoic acid
  MOD_RES (11)..(11): (S)-2-amino-2-methyldec-9-enoic acid
  MOD_RES (12)..(12): (S)-2-amino-3-(3-fluorophenyl)propanoic acid
  MOD_RES (13)..(13): (S)-2-amino-3-(benzo[b]thiophen-3-yl)propanoic acid
  C-term amino
XDAXDXAAFVXFXQ

SEQ ID NO: 258 - protein, 14 aa, Artificial Sequence
  Description of Artificial Sequence: Synthetic peptide
  N-term Acetic Acid
  MOD_RES (1)..(1): (R)-2-allylpyrrolidine-2-carboxylic acid
  MOD_RES (4)..(4): 2-amino-2-(pent-4-en-1-yl)hept-6-enoic acid
  MOD_RES (6)..(6): Nt-methyl-L-histidine
  MOD_RES (11)..(11): (S)-2-amino-2-methyldec-9-enoic acid
  MOD_RES (12)..(12): (S)-2-amino-3-(3-fluorophenyl)propanoic acid
  MOD_RES (13)..(13): (S)-2-amino-3-(benzo[b]thiophen-3-yl)propanoic acid
  C-term amino
XDAXDHAAFVXFXQ

SEQ ID NO: 259 - protein, 14 aa, Artificial Sequence
  Description of Artificial Sequence: Synthetic peptide
  N-term Acetic Acid
  MOD_RES (1)..(1): (R)-2-allylpyrrolidine-2-carboxylic acid
  MOD_RES (4)..(4): 2-amino-2-(pent-4-en-1-yl)hept-6-enoic acid
  MOD_RES (6)..(6): (S)-2-amino-3-((carboxymethyl)(2,2,2-trifluoroethyl)amino) propanoic acid
  MOD_RES (9)..(9): (S)-2-amino-3-(m-tolyl)propanoic acid
  MOD_RES (11)..(11): (S)-2-amino-2-methyldec-9-enoic acid
  MOD_RES (12)..(12): (S)-2-amino-3-(3-fluorophenyl)propanoic acid
  MOD_RES (13)..(13): (S)-2-amino-3-(benzo[b]thiophen-3-yl)propanoic acid
  C-term amino
XDAXDXAAXQXFXQ

SEQ ID NO: 260 - protein, 14 aa, Artificial Sequence
  Description of Artificial Sequence: Synthetic peptide
  N-term Acetic Acid
  MOD_RES (1)..(1): (R)-2-allylpyrrolidine-2-carboxylic acid
  MOD_RES (4)..(4): 2-amino-2-(pent-4-en-1-yl)hept-6-enoic acid
  MOD_RES (6)..(6): (S)-2-amino-3-((carboxymethyl)(2,2,2-trifluoroethyl)amino) propanoic acid
  MOD_RES (9)..(9): (S)-2-amino-3-(m-tolyl)propanoic acid
  MOD_RES (11)..(11): (S)-5-(((allyloxy)carbonyl)(methyl)amino)-2-amino-2- methylpentanoic acid
  MOD_RES (12)..(12): (S)-2-amino-3-(3-fluorophenyl)propanoic acid
  MOD_RES (13)..(13): (S)-2-amino-3-(benzo[b]thiophen-3-yl)propanoic acid
  C-term amino
XDAXDXAAXQXFXQ

SEQ ID NO: 261 - protein, 14 aa, Artificial Sequence
  Description of Artificial Sequence: Synthetic peptide
  N-term Acetic Acid
  MOD_RES (1)..(1): (R)-2-allylpyrrolidine-2-carboxylic acid
  MOD_RES (4)..(4): 2-amino-2-(pent-4-en-1-yl)hept-6-enoic acid
  MOD_RES (11)..(11): (S)-2-amino-2-methyldec-9-enoic acid
  MOD_RES (13)..(13): (S)-2-amino-3-(benzo[b]thiophen-3-yl)propanoic acid
  C-term amino
XDAXDEAAFQXFXQ

SEQ ID NO: 262 - protein, 14 aa, Artificial Sequence
  Description of Artificial Sequence: Synthetic peptide
  N-term Acetic Acid
  MOD_RES (1)..(1): (R)-2-allylpyrrolidine-2-carboxylic acid
  MOD_RES (4)..(4): 2-amino-2-(pent-4-en-1-yl)hept-6-enoic acid
  MOD_RES (11)..(11): (S)-2-amino-2-methyldec-9-enoic acid
  MOD_RES (13)..(13): (S)-2-amino-3-(benzo[b]thiophen-3-yl)propanoic acid
  C-term amino
XDIXDEAAFQXFXQ

SEQ ID NO: 263 - protein, 13 aa, Artificial Sequence
  Description of Artificial Sequence: Synthetic peptide
  N-term Acetic Acid
  MOD_RES (1)..(1): (R)-2-allylpyrrolidine-2-carboxylic acid
  MOD_RES (4)..(4): 2-amino-2-(pent-4-en-1-yl)hept-6-enoic acid
  MOD_RES (11)..(11): (S)-2-amino-2-methyldec-9-enoic acid
  MOD_RES (13)..(13): (S)-2-amino-3-(benzo[b]thiophen-3-yl)propanoic acid
  C-term amino
XDIXDEAAFQXFX

SEQ ID NO: 264 - protein, 14 aa, Artificial Sequence
  Description of Artificial Sequence: Synthetic peptide
  N-term Acetic Acid
  MOD_RES (1)..(1): (R)-2-allylpyrrolidine-2-carboxylic acid
  MOD_RES (4)..(4): 2-amino-2-(pent-4-en-1-yl)hept-6-enoic acid
  MOD_RES (11)..(11): (S)-2-amino-2-methyldec-9-enoic acid
  MOD_RES (13)..(13): (S)-2-amino-3-(benzo[b]thiophen-3-yl)propanoic acid
  C-term amino
XDVXDEAAFQXFXQ

SEQ ID NO: 265 - protein, 14 aa, Artificial Sequence
  Description of Artificial Sequence: Synthetic peptide
  N-term Acetic Acid
  MOD_RES (1)..(1): (R)-2-allylpyrrolidine-2-carboxylic acid
  MOD_RES (3)..(3): (S)-2-aminohexanoic acid
  MOD_RES (4)..(4): 2-amino-2-(pent-4-en-1-yl)hept-6-enoic acid
  MOD_RES (11)..(11): (S)-2-amino-2-methyldec-9-enoic acid
  MOD_RES (13)..(13): (S)-2-amino-3-(benzo[b]thiophen-3-yl)propanoic acid
  C-term amino
XDXXDEAAFAXFXQ

SEQ ID NO: 266 - protein, 14 aa, Artificial Sequence
  Description of Artificial Sequence: Synthetic peptide
  N-term Acetic Acid
  MOD_RES (1)..(1): (R)-2-allylpyrrolidine-2-carboxylic acid
  MOD_RES (4)..(4): 2-amino-2-(pent-4-en-1-yl)hept-6-enoic acid
  MOD_RES (9)..(9): (S)-2-amino-3-(thiophen-2-yl)propanoic acid
  MOD_RES (11)..(11): (S)-2-amino-2-methyldec-9-enoic acid
  MOD_RES (12)..(12): (S)-2-amino-3-(3-fluorophenyl)propanoic acid
  MOD_RES (13)..(13): (S)-2-amino-3-(benzo[b]thiophen-3-yl)propanoic acid
  C-term amino
XDIXDEAAXQXFXQ

SEQ ID NO: 267 - protein, 14 aa, Artificial Sequence
  Description of Artificial Sequence: Synthetic peptide
  N-term Acetic Acid
  MOD_RES (1)..(1): (R)-2-allylpyrrolidine-2-carboxylic acid
  MOD_RES (4)..(4): 2-amino-2-(pent-4-en-1-yl)hept-6-enoic acid
  MOD_RES (6)..(6): (S)-2-amino-3-(2H-tetrazol-5-yl)propanoic acid
  MOD_RES (11)..(11): (S)-2-amino-2-methyldec-9-enoic acid
  MOD_RES (13)..(13): (S)-2-amino-3-(benzo[b]thiophen-3-yl)propanoic acid
  C-term amino
XDAXDXAAFQXFXQ

SEQ ID NO: 268 - protein, 14 aa, Artificial Sequence
  Description of Artificial Sequence: Synthetic peptide
  N-term Acetic Acid
  MOD_RES (1)..(1): (R)-2-allylpyrrolidine-2-carboxylic acid
  MOD_RES (4)..(4): 2-amino-2-(pent-4-en-1-yl)hept-6-enoic acid
  MOD_RES (5)..(5): (S)-2-amino-3-(2H-tetrazol-5-yl)propanoic acid
  MOD_RES (11)..(11): (S)-2-amino-2-methyldec-9-enoic acid
  MOD_RES (13)..(13): (S)-2-amino-3-(benzo[b]thiophen-3-yl)propanoic acid
  C-term amino
XDAXXEAAFQXFXQ

SEQ ID NO: 269 - protein, 14 aa, Artificial Sequence
  Description of Artificial Sequence: Synthetic peptide
  N-term Acetic Acid
  MOD_RES (1)..(1): (R)-2-allylpyrrolidine-2-carboxylic acid
  MOD_RES (2)..(2): (S)-2-amino-3-(2H-tetrazol-5-yl)propanoic acid
  MOD_RES (4)..(4): 2-amino-2-(pent-4-en-1-yl)hept-6-enoic acid
  MOD_RES (11)..(11): (S)-2-amino-2-methyldec-9-enoic acid
  MOD_RES (13)..(13): (S)-2-amino-3-(benzo[b]thiophen-3-yl)propanoic acid
  C-term amino
XXAXDEAAFQXFXQ

SEQ ID NO: 270 - protein, 14 aa, Artificial Sequence
  Description of Artificial Sequence: Synthetic peptide
  N-term Acetic Acid
  MOD_RES (1)..(1): (R)-2-allylpyrrolidine-2-carboxylic acid
  MOD_RES (4)..(4): 2-amino-2-(pent-4-en-1-yl)hept-6-enoic acid
  MOD_RES (11)..(11): (S)-2-amino-2-methyldec-9-enoic acid
  MOD_RES (13)..(13): (S)-2-amino-3-(benzo[b]thiophen-3-yl)propanoic acid
  C-term amino
XDAXDEAAFQXFXH

SEQ ID NO: 271 - protein, 14 aa, Artificial Sequence
  Description of Artificial Sequence: Synthetic peptide
  N-term Acetic Acid
  MOD_RES (1)..(1): (R)-2-allylpyrrolidine-2-carboxylic acid
  MOD_RES (4)..(4): 2-amino-2-(pent-4-en-1-yl)hept-6-enoic acid
  MOD_RES (11)..(11): (S)-2-amino-2-methyldec-9-enoic acid
  MOD_RES (13)..(13): (S)-2-amino-3-(benzo[b]thiophen-3-yl)propanoic acid
  C-term amino
XDAXDEAAFTXFXH

SEQ ID NO: 272 - protein, 14 aa, Artificial Sequence
  Description of Artificial Sequence: Synthetic peptide
  N-term Acetic Acid
  MOD_RES (1)..(1): (R)-2-allylpyrrolidine-2-carboxylic acid
  MOD_RES (4)..(4): 2-amino-2-(pent-4-en-1-yl)hept-6-enoic acid
  MOD_RES (11)..(11): (S)-2-amino-2-methyldec-9-enoic acid
  MOD_RES (13)..(13): (S)-2-amino-3-(benzo[b]thiophen-3-yl)propanoic acid
  C-term amino
XDAXDEAAFNXFXH

SEQ ID NO: 273 - protein, 14 aa, Artificial Sequence
  Description of Artificial Sequence: Synthetic peptide
  N-term Acetic Acid
  MOD_RES (1)..(1): (R)-2-allylpyrrolidine-2-carboxylic acid
  MOD_RES (4)..(4): 2-amino-2-(pent-4-en-1-yl)hept-6-enoic acid
  MOD_RES (11)..(11): (S)-2-amino-2-methyldec-9-enoic acid
  MOD_RES (13)..(13): (S)-2-amino-3-(benzo[b]thiophen-3-yl)propanoic acid
  C-term amino
XDAXDEAAFTXFXQ

SEQ ID NO: 274 - protein, 14 aa, Artificial Sequence
  Description of Artificial Sequence: Synthetic peptide
  N-term Acetic Acid
  MOD_RES (1)..(1): (R)-2-allylpyrrolidine-2-carboxylic acid
  MOD_RES (4)..(4): 2-amino-2-(pent-4-en-1-yl)hept-6-enoic acid
  MOD_RES (11)..(11): (S)-2-amino-2-methyldec-9-enoic acid
  MOD_RES (13)..(13): (S)-2-amino-3-(benzo[b]thiophen-3-yl)propanoic acid
  C-term amino
XDAXDEAAFNXFXQ

SEQ ID NO: 275 - protein, 14 aa, Artificial Sequence
  Description of Artificial Sequence: Synthetic peptide
  N-term Acetic Acid
  MOD_RES (1)..(1): (R)-2-allylpyrrolidine-2-carboxylic acid
  MOD_RES (4)..(4): 2-amino-2-(pent-4-en-1-yl)hept-6-enoic acid
  MOD_RES (11)..(11): (S)-2-amino-2-methyldec-9-enoic acid
  MOD_RES (12)..(12): (S)-2-amino-3-(thiophen-3-yl)propanoic acid
  MOD_RES (13)..(13): (S)-2-amino-3-(benzo[b]thiophen-3-yl)propanoic acid
  C-term amino
XDAXDEAAFQXXXQ

SEQ ID NO: 276 - protein, 14 aa, Artificial Sequence
  Description of Artificial Sequence: Synthetic peptide
  N-term Acetic Acid
  MOD_RES (1)..(1): (R)-2-allylpyrrolidine-2-carboxylic acid
  MOD_RES (4)..(4): 2-amino-2-(pent-4-en-1-yl)hept-6-enoic acid
  MOD_RES (11)..(11): (S)-2-amino-2-methyldec-9-enoic acid
  MOD_RES (12)..(12): (S)-2-amino-3-(thiophen-2-yl)propanoic acid
  MOD_RES (13)..(13): (S)-2-amino-3-(benzo[b]thiophen-3-yl)propanoic acid
  C-term amino
XDAXDEAAFQXXXQ

SEQ ID NO: 277 - protein, 14 aa, Artificial Sequence
  Description of Artificial Sequence: Synthetic peptide
  N-term Acetic Acid
  MOD_RES (1)..(1): (R)-2-allylpyrrolidine-2-carboxylic acid
  MOD_RES (4)..(4): 2-amino-2-(pent-4-en-1-yl)hept-6-enoic acid
  MOD_RES (9)..(9): (S)-2-amino-3-(thiophen-3-yl)propanoic acid
  MOD_RES (11)..(11): (S)-2-amino-2-methyldec-9-enoic acid
  MOD_RES (12)..(12): (S)-2-amino-3-(3-fluorophenyl)propanoic acid
  MOD_RES (13)..(13): (S)-2-amino-3-(benzo[b]thiophen-3-yl)propanoic acid
  C-term amino
XDAXDEAAXQXFXQ

SEQ ID NO: 278 - protein, 14 aa, Artificial Sequence
  Description of Artificial Sequence: Synthetic peptide
  N-term Acetic Acid
  MOD_RES (1)..(1): (R)-2-allylpyrrolidine-2-carboxylic acid
  MOD_RES (4)..(4): 2-amino-2-(pent-4-en-1-yl)hept-6-enoic acid
  MOD_RES (9)..(9): (S)-2-amino-3-(thiophen-3-yl)propanoic acid
  MOD_RES (11)..(11): (S)-2-amino-2-methyldec-9-enoic acid
  MOD_RES (12)..(12): (S)-2-amino-3-(3-fluorophenyl)propanoic acid
  MOD_RES (13)..(13): (S)-2-amino-3-(benzo[b]thiophen-3-yl)propanoic acid
  C-term amino
XDAXDEAAXQXFXH

SEQ ID NO: 279 - protein, 13 aa, Artificial Sequence
  Description of Artificial Sequence: Synthetic peptide
  N-term Acetic Acid
  MOD_RES (1)..(1): (R)-2-allylpyrrolidine-2-carboxylic acid
  MOD_RES (4)..(4): 2-amino-2-(pent-4-en-1-yl)hept-6-enoic acid
  MOD_RES (9)..(9): (S)-2-amino-3-(thiophen-3-yl)propanoic acid
  MOD_RES (11)..(11): (S)-2-amino-2-methyldec-9-enoic acid
  MOD_RES (12)..(12): (S)-2-amino-3-(3-fluorophenyl)propanoic acid
  MOD_RES (13)..(13): (S)-2-amino-3-(benzo[b]thiophen-3-yl)propanoic acid
  C-term amino
XDAXDEAAXQXFX

SEQ ID NO: 280 - protein, 13 aa, Artificial Sequence
  Description of Artificial Sequence: Synthetic peptide
  N-term Acetic Acid
  MOD_RES (1)..(1): (R)-2-allylpyrrolidine-2-carboxylic acid
  MOD_RES (4)..(4): 2-amino-2-(pent-4-en-1-yl)hept-6-enoic acid
  MOD_RES (11)..(11): (S)-2-amino-2-methyldec-9-enoic acid
  MOD_RES (13)..(13): (S)-2-amino-3-(benzo[b]thiophen-3-yl)propanoic acid
  C-term amino
XDAXDEAAFNXFX

SEQ ID NO: 281 - protein, 14 aa, Artificial Sequence
  Description of Artificial Sequence: Synthetic peptide
  N-term Acetic Acid
  MOD_RES (1)..(1): (R)-2-allylpyrrolidine-2-carboxylic acid
  MOD_RES (4)..(4): 2-amino-2-(pent-4-en-1-yl)hept-6-enoic acid
  MOD_RES (10)..(10): O-methyl-L-serine
  MOD_RES (11)..(11): (S)-2-amino-2-methyldec-9-enoic acid
  MOD_RES (13)..(13): (S)-2-amino-3-(benzo[b]thiophen-3-yl)propanoic acid
  C-term amino
XDAXDEAAFSXFXQ

SEQ ID NO: 282 - protein, 14 aa, Artificial Sequence
  Description of Artificial Sequence: Synthetic peptide
  N-term Acetic Acid
  MOD_RES (1)..(1): (R)-2-allylpyrrolidine-2-carboxylic acid
  MOD_RES (4)..(4): 2-amino-2-(pent-4-en-1-yl)hept-6-enoic acid
  MOD_RES (11)..(11): (S)-2-amino-2-methyldec-9-enoic acid
  MOD_RES (12)..(12): (S)-2-amino-3-(2-fluorophenyl)propanoic acid
  MOD_RES (13)..(13): (S)-2-amino-3-(benzo[b]thiophen-3-yl)propanoic acid
  C-term amino
XDAXDEAAFNXFXQ

SEQ ID NO: 283 - protein, 14 aa, Artificial Sequence
  Description of Artificial Sequence: Synthetic peptide
  N-term Acetic Acid
  MOD_RES (1)..(1): (R)-2-allylpyrrolidine-2-carboxylic acid
  MOD_RES (4)..(4): 2-amino-2-(pent-4-en-1-yl)hept-6-enoic acid
  MOD_RES (11)..(11): (S)-2-amino-2-methyldec-9-enoic acid
  MOD_RES (12)..(12): (S)-2-amino-3-(2-chlorophenyl)propanoic acid
  MOD_RES (13)..(13): (S)-2-amino-3-(benzo[b]thiophen-3-yl)propanoic acid
  C-term amino
XDAXDEAAFNXFXQ

SEQ ID NO: 284 - protein, 14 aa, Artificial Sequence
  Description of Artificial Sequence: Synthetic peptide
  N-term Acetic Acid
  MOD_RES (1)..(1): (R)-2-allylpyrrolidine-2-carboxylic acid
  MOD_RES (4)..(4): 2-amino-2-(pent-4-en-1-yl)hept-6-enoic acid
  MOD_RES (11)..(11): (S)-2-amino-2-methyldec-9-enoic acid
  MOD_RES (12)..(12): (S)-2-amino-3-(2-bromophenyl)propanoic acid
  MOD_RES (13)..(13): (S)-2-amino-3-(benzo[b]thiophen-3-yl)propanoic acid
  C-term amino
XDAXDEAAFNXFXQ

SEQ ID NO: 285 - protein, 14 aa, Artificial Sequence
  Description of Artificial Sequence: Synthetic peptide
  N-term Acetic Acid
  MOD_RES (1)..(1): (R)-2-allylpyrrolidine-2-carboxylic acid
  MOD_RES (4)..(4): 2-amino-2-(pent-4-en-1-yl)hept-6-enoic acid
  MOD_RES (11)..(11): (S)-2-amino-2-methyldec-9-enoic acid
  MOD_RES (12)..(12): (S)-2-amino-3-(2-methoxyphenyl)propanoic acid
  MOD_RES (13)..(13): (S)-2-amino-3-(benzo[b]thiophen-3-yl)propanoic acid
  C-term amino
XDAXDEAAFNXFXQ

SEQ ID NO: 286 - protein, 14 aa, Artificial Sequence
  Description of Artificial Sequence: Synthetic peptide
  N-term Acetic Acid
  MOD_RES (1)..(1): (R)-2-allylpyrrolidine-2-carboxylic acid
  MOD_RES (4)..(4): 2-amino-2-(pent-4-en-1-yl)hept-6-enoic acid
  MOD_RES (11)..(11): (S)-2-amino-2-methyldec-9-enoic acid
  MOD_RES (12)..(12): Np-methyl-D-histidine
  MOD_RES (13)..(13): (S)-2-amino-3-(benzo[b]thiophen-3-yl)propanoic acid
  C-term amino
XDAXDEAAFNXHXQ

SEQ ID NO: 287 - protein, 14 aa, Artificial Sequence
  Description of Artificial Sequence: Synthetic peptide
  N-term Acetic Acid
  MOD_RES (1)..(1): (R)-2-allylpyrrolidine-2-carboxylic acid
  MOD_RES (4)..(4): 2-amino-2-(pent-4-en-1-yl)hept-6-enoic acid
  MOD_RES (11)..(11): (S)-2-amino-2-methyldec-9-enoic acid
  MOD_RES (12)..(12): Nt-methyl-L-histidine
  MOD_RES (13)..(13): (S)-2-amino-3-(benzo[b]thiophen-3-yl)propanoic acid
  C-term amino
XDAXDEAAFNXHXQ

SEQ ID NO: 288 - protein, 14 aa, Artificial Sequence
  Description of Artificial Sequence: Synthetic peptide
  N-term Acetic Acid
  MOD_RES (1)..(1): (R)-2-allylpyrrolidine-2-carboxylic acid
  MOD_RES (4)..(4): 2-amino-2-(pent-4-en-1-yl)hept-6-enoic acid
  MOD_RES (11)..(11): (S)-2-amino-2-methyldec-9-enoic acid
  MOD_RES (12)..(12): (S)-2-amino-3-(2-nitrophenyl)propanoic acid
  MOD_RES (13)..(13): (S)-2-amino-3-(benzo[b]thiophen-3-yl)propanoic acid
  C-term amino
XDAXDEAAFNXFXQ

SEQ ID NO: 289 - protein, 14 aa, Artificial Sequence
  Description of Artificial Sequence: Synthetic peptide
  N-term Acetic Acid
  MOD_RES (1)..(1): (R)-2-allylpyrrolidine-2-carboxylic acid
  MOD_RES (4)..(4): 2-amino-2-(pent-4-en-1-yl)hept-6-enoic acid
  MOD_RES (11)..(11): (S)-2-amino-2-methyldec-9-enoic acid
  MOD_RES (12)..(12): (S)-2-amino-4-phenylbutanoic acid
  MOD_RES (13)..(13): (S)-2-amino-3-(benzo[b]thiophen-3-yl)propanoic acid
  C-term amino
XDAXDEAAFNXXXQ

SEQ ID NO: 290 - protein, 14 aa, Artificial Sequence
  Description of Artificial Sequence: Synthetic peptide
  N-term Acetic Acid
  MOD_RES (1)..(1): (R)-2-allylpyrrolidine-2-carboxylic acid
  MOD_RES (4)..(4): 2-amino-2-(pent-4-en-1-yl)hept-6-enoic acid
  MOD_RES (6)..(6): (S)-2-amino-3-(2H-tetrazol-5-yl)propanoic acid
  MOD_RES (11)..(11): (S)-2-amino-2-methyldec-9-enoic acid
  MOD_RES (13)..(13): (S)-2-amino-3-(benzo[b]thiophen-3-yl)propanoic acid
  C-term amino
XDAXDXAAFNXFXQ

SEQ ID NO: 291 - protein, 14 aa, Artificial Sequence
  Description of Artificial Sequence: Synthetic peptide
  N-term Acetic Acid
  MOD_RES (1)..(1): (R)-2-allylpyrrolidine-2-carboxylic acid
  MOD_RES (4)..(4): 2-amino-2-(pent-4-en-1-yl)hept-6-enoic acid
  MOD_RES (5)..(5): (S)-2-amino-3-(2H-tetrazol-5-yl)propanoic acid
  MOD_RES (11)..(11): (S)-2-amino-2-methyldec-9-enoic acid
  MOD_RES (13)..(13): (S)-2-amino-3-(benzo[b]thiophen-3-yl)propanoic acid
  C-term amino
XDAXXDAAFNXFXQ

SEQ ID NO: 292 - protein, 14 aa, Artificial Sequence
  Description of Artificial Sequence: Synthetic peptide
  N-term Acetic Acid
  MOD_RES (1)..(1): (R)-2-allylpyrrolidine-2-carboxylic acid
  MOD_RES (4)..(4): 2-amino-2-(pent-4-en-1-yl)hept-6-enoic acid
  MOD_RES (9)..(9): (S)-2-amino-3-(thiophen-2-yl)propanoic acid
  MOD_RES (11)..(11): (S)-2-amino-2-methyldec-9-enoic acid
  MOD_RES (13)..(13): (S)-2-amino-3-(benzo[b]thiophen-3-yl)propanoic acid
  C-term amino
XDAXDEAAXNXFXQ

SEQ ID NO: 293 - protein, 14 aa, Artificial Sequence
  Description of Artificial Sequence: Synthetic peptide
  N-term Acetic Acid
  MOD_RES (1)..(1): (R)-2-allylpyrrolidine-2-carboxylic acid
  MOD_RES (4)..(4): 2-amino-2-(pent-4-en-1-yl)hept-6-enoic acid
  MOD_RES (9)..(9): (S)-2-amino-3-(thiophen-3-yl)propanoic acid
  MOD_RES (11)..(11): (S)-2-amino-2-methyldec-9-enoic acid
  MOD_RES (13)..(13): (S)-2-amino-3-(benzo[b]thiophen-3-yl)propanoic acid
  C-term amino
XDAXDEAAXNXFXQ

SEQ ID NO: 294 - protein, 14 aa, Artificial Sequence
  Description of Artificial Sequence: Synthetic peptide
  N-term Acetic Acid
  MOD_RES (1)..(1): (R)-2-allylpyrrolidine-2-carboxylic acid
  MOD_RES (4)..(4): 2-amino-2-(pent-4-en-1-yl)hept-6-enoic acid
  MOD_RES (9)..(9): (S)-2-amino-3-(thiophen-2-yl)propanoic acid
  MOD_RES (11)..(11): (S)-2-amino-2-methyldec-9-enoic acid
  MOD_RES (12)..(12): (S)-2-amino-3-(3-fluorophenyl)propanoic acid
  C-term amino
XDAXDEAAXQXFWQ

SEQ ID NO: 295 - protein, 14 aa, Artificial Sequence
  Description of Artificial Sequence: Synthetic peptide
  N-term Acetic Acid
  MOD_RES (1)..(1): (R)-2-allylpyrrolidine-2-carboxylic acid
  MOD_RES (4)..(4): 2-amino-2-(pent-4-en-1-yl)hept-6-enoic acid
  MOD_RES (9)..(9): (S)-2-amino-3-(thiophen-3-yl)propanoic acid
  MOD_RES (11)..(11): (S)-2-amino-2-methyldec-9-enoic acid
  MOD_RES (12)..(12): (S)-2-amino-3-(3-fluorophenyl)propanoic acid
  C-term amino
XDAXDEAAXQXFWQ

SEQ ID NO: 296 - protein, 14 aa, Artificial Sequence
  Description of Artificial Sequence: Synthetic peptide
  N-term Acetic Acid
  MOD_RES (1)..(1): (R)-2-allylpyrrolidine-2-carboxylic acid
  MOD_RES (4)..(4): 2-amino-2-(pent-4-en-1-yl)hept-6-enoic acid
  MOD_RES (9)..(9): (S)-2-amino-3-(2-fluorophenyl)propanoic acid
  MOD_RES (11)..(11): (S)-2-amino-2-methyldec-9-enoic acid
  MOD_RES (13)..(13): (S)-2-amino-3-(benzo[b]thiophen-3-yl)propanoic acid
  C-term amino
XDAXDEAAFNXFXQ

SEQ ID NO: 297 - protein, 14 aa, Artificial Sequence
  Description of Artificial Sequence: Synthetic peptide
  N-term Acetic Acid
  MOD_RES (1)..(1): (R)-2-allylpyrrolidine-2-carboxylic acid
  MOD_RES (4)..(4): 2-amino-2-(pent-4-en-1-yl)hept-6-enoic acid
  MOD_RES (9)..(9): (S)-2-amino-3-(3-fluorophenyl)propanoic acid
  MOD_RES (11)..(11): (S)-2-amino-2-methyldec-9-enoic acid
  MOD_RES (13)..(13): (S)-2-amino-3-(benzo[b]thiophen-3-yl)propanoic acid
  C-term amino
XDAXDEAAFNXFXQ

SEQ ID NO: 298 - protein, 14 aa, Artificial Sequence
  Description of Artificial Sequence: Synthetic peptide
  N-term Acetic Acid
  MOD_RES (1)..(1): (R)-2-allylpyrrolidine-2-carboxylic acid
  MOD_RES (4)..(4): 2-amino-2-(pent-4-en-1-yl)hept-6-enoic acid
  MOD_RES (9)..(9): (S)-2-amino-3-(4-fluorophenyl)propanoic acid
  MOD_RES (11)..(11): (S)-2-amino-2-methyldec-9-enoic acid
  MOD_RES (13)..(13): (S)-2-amino-3-(benzo[b]thiophen-3-yl)propanoic acid
  C-term amino
XDAXDEAAFNXFXQ

SEQ ID NO: 299 - protein, 14 aa, Artificial Sequence
  Description of Artificial Sequence: Synthetic peptide
  N-term Acetic Acid
  MOD_RES (1)..(1): (R)-2-allylpyrrolidine-2-carboxylic acid
  MOD_RES (4)..(4): 2-amino-2-(pent-4-en-1-yl)hept-6-enoic acid
  MOD_RES (9)..(9): (S)-2-amino-3-(o-tolyl)propanoic acid
  MOD_RES (11)..(11): (S)-2-amino-2-methyldec-9-enoic acid
  MOD_RES (13)..(13): (S)-2-amino-3-(benzo[b]thiophen-3-yl)propanoic acid
  C-term amino
XDAXDEAAXNXFXQ

SEQ ID NO: 300 - protein, 14 aa, Artificial Sequence
  Description of Artificial Sequence: Synthetic peptide
  N-term Acetic Acid
  MOD_RES (1)..(1): (R)-2-allylpyrrolidine-2-carboxylic acid
  MOD_RES (4)..(4): 2-amino-2-(pent-4-en-1-yl)hept-6-enoic acid
  MOD_RES (9)..(9): (S)-2-amino-3-(m-tolyl)propanoic acid
  MOD_RES (11)..(11): (S)-2-amino-2-methyldec-9-enoic acid
  MOD_RES (13)..(13): (S)-2-amino-3-(benzo[b]thiophen-3-yl)propanoic acid
  C-term amino
XDAXDEAAXNXFXQ

SEQ ID NO: 301 - protein, 14 aa, Artificial Sequence
  Description of Artificial Sequence: Synthetic peptide
  N-term Acetic Acid
  MOD_RES (1)..(1): (R)-2-allylpyrrolidine-2-carboxylic acid
  MOD_RES (4)..(4): 2-amino-2-(pent-4-en-1-yl)hept-6-enoic acid
  MOD_RES (9)..(9): (S)-2-amino-3-(p-tolyl)propanoic acid
  MOD_RES (11)..(11): (S)-2-amino-2-methyldec-9-enoic acid
  MOD_RES (13)..(13): (S)-2-amino-3-(benzo[b]thiophen-3-yl)propanoic acid
  C-term amino
XDAXDEAAXNXFXQ

SEQ ID NO: 302 - protein, 14 aa, Artificial Sequence
  Description of Artificial Sequence: Synthetic peptide
  N-term Acetic Acid
  MOD_RES (1)..(1): (R)-2-allylpyrrolidine-2-carboxylic acid
  MOD_RES (4)..(4): 2-amino-2-(pent-4-en-1-yl)hept-6-enoic acid
  MOD_RES (9)..(9): (S)-2-amino-3-(furan-2-yl)propanoic acid
  MOD_RES (11)..(11): (S)-2-amino-2-methyldec-9-enoic acid
  MOD_RES (13)..(13): (S)-2-amino-3-(benzo[b]thiophen-3-yl)propanoic acid
  C-term amino
XDAXDEAAXNXFXQ

SEQ ID NO: 303 - protein, 14 aa, Artificial Sequence
  Description of Artificial Sequence: Synthetic peptide
  N-term Acetic Acid
  MOD_RES (1)..(1): (R)-2-allylpyrrolidine-2-carboxylic acid
  MOD_RES (4)..(4): 2-amino-2-(pent-4-en-1-yl)hept-6-enoic acid
  MOD_RES (9)..(9): (S)-2-amino-3-(4-aminophenyl)propanoic acid
  MOD_RES (11)..(11): (S)-2-amino-2-methyldec-9-enoic acid
  MOD_RES (13)..(13): (S)-2-amino-3-(benzo[b]thiophen-3-yl)propanoic acid
  C-term amino
XDAXDEAAXNXFXQ

SEQ ID NO: 304 - protein, 14 aa, Artificial Sequence
  Description of Artificial Sequence: Synthetic peptide
  N-term Acetic Acid
  MOD_RES (1)..(1): (R)-2-allylpyrrolidine-2-carboxylic acid
  MOD_RES (4)..(4): 2-amino-2-(pent-4-en-1-yl)hept-6-enoic acid
  MOD_RES (11)..(11): (S)-3-amino-1-((pent-4-en-1-yloxy)carbonyl)pyrrolidine-3- carboxylic acid
  MOD_RES (13)..(13): (S)-2-amino-3-(benzo[b]thiophen-3-yl)propanoic acid
  C-term amino
XDAXDEAAFNXFXQ

SEQ ID NO: 305 - protein, 14 aa, Artificial Sequence
  Description of Artificial Sequence: Synthetic peptide
  N-term Acetic Acid
  MOD_RES (1)..(1): (R)-2-allylpyrrolidine-2-carboxylic acid
  MOD_RES (4)..(4): 2-amino-2-(pent-4-en-1-yl)hept-6-enoic acid
  MOD_RES (11)..(11): (S)-3-amino-1-((hex-5-en-1-yloxy)carbonyl)pyrrolidine-3- carboxylic acid
  MOD_RES (13)..(13): (S)-2-amino-3-(benzo[b]thiophen-3-yl)propanoic acid
  C-term amino
XDAXDEAAFNXFXQ

SEQ ID NO: 306 - protein, 14 aa, Artificial Sequence
  Description of Artificial Sequence: Synthetic peptide
  N-term Acetic Acid
  MOD_RES (1)..(1): (R)-2-allylpyrrolidine-2-carboxylic acid
  MOD_RES (4)..(4): 2-amino-2-(pent-4-en-1-yl)hept-6-enoic acid
  MOD_RES (11)..(11): (S)-2-amino-2-methyldec-9-enoic acid
  MOD_RES (13)..(13): (S)-2-amino-3-(benzo[b]thiophen-3-yl)propanoic acid
  C-term amino
XDAXDDAAFNXFXH

SEQ ID NO: 307 - protein, 14 aa, Artificial Sequence
  Description of Artificial Sequence: Synthetic peptide
  N-term Acetic Acid
  MOD_RES (1)..(1): (R)-2-allylpyrrolidine-2-carboxylic acid
  MOD_RES (4)..(4): 2-amino-2-(pent-4-en-1-yl)hept-6-enoic acid
  MOD_RES (11)..(11): (S)-2-amino-2-methyldec-9-enoic acid
  MOD_RES (13)..(13): (S)-2-amino-3-(benzo[b]thiophen-3-yl)propanoic acid
  C-term amino
XDIXDDAAFNXFXQ

SEQ ID NO: 308 - protein, 14 aa, Artificial Sequence
  Description of Artificial Sequence: Synthetic peptide
  N-term Acetic Acid
  MOD_RES (1)..(1): (R)-2-allylpyrrolidine-2-carboxylic acid
  MOD_RES (4)..(4): 2-amino-2-(pent-4-en-1-yl)hept-6-enoic acid
  MOD_RES (11)..(11): (S)-2-amino-2-methyldec-9-enoic acid
  MOD_RES (13)..(13): (S)-2-amino-3-(benzo[b]thiophen-3-yl)propanoic acid
  C-term amino
XDIXDDAAFNXFXH

SEQ ID NO: 309 - protein, 14 aa, Artificial Sequence
  Description of Artificial Sequence: Synthetic peptide
  N-term Acetic Acid
  MOD_RES (1)..(1): (R)-2-allylpyrrolidine-2-carboxylic acid
  MOD_RES (4)..(4): 2-amino-2-(pent-4-en-1-yl)hept-6-enoic acid
  MOD_RES (11)..(11): (S)-2-amino-2-methyldec-9-enoic acid
  MOD_RES (13)..(13): (S)-2-amino-3-(benzo[b]thiophen-3-yl)propanoic acid
  C-term amino
XDIXDEAAFQXFXH

SEQ ID NO: 310 - protein, 14 aa, Artificial Sequence
  Description of Artificial Sequence: Synthetic peptide
  N-term Acetic Acid
  MOD_RES (1)..(1): (R)-2-allylpyrrolidine-2-carboxylic acid
  MOD_RES (4)..(4): 2-amino-2-(pent-4-en-1-yl)hept-6-enoic acid
  MOD_RES (11)..(11): (S)-2-amino-2-methyldec-9-enoic acid
  MOD_RES (13)..(13): (S)-2-amino-3-(benzo[b]thiophen-3-yl)propanoic acid
  C-term amino
XDIXDEAAFNXFXH

SEQ ID NO: 311 - protein, 14 aa, Artificial Sequence
  Description of Artificial Sequence: Synthetic peptide
  N-term Acetic Acid
  MOD_RES (1)..(1): (R)-2-allylpyrrolidine-2-carboxylic acid
  MOD_RES (3)..(3): (S)-2-aminobutanoic acid
  MOD_RES (4)..(4): 2-amino-2-(pent-4-en-1-yl)hept-6-enoic acid
  MOD_RES (11)..(11): (S)-2-amino-2-methyldec-9-enoic acid
  MOD_RES (13)..(13): (S)-2-amino-3-(benzo[b]thiophen-3-yl)propanoic acid
  C-term amino
XDXXDEAAFNXFXQ

SEQ ID NO: 312 - protein, 14 aa, Artificial Sequence
  Description of Artificial Sequence: Synthetic peptide
  N-term Acetic Acid
  MOD_RES (1)..(1): (R)-2-allylpyrrolidine-2-carboxylic acid
  MOD_RES (3)..(3): L-alloisoleucine
  MOD_RES (4)..(4): 2-amino-2-(pent-4-en-1-yl)hept-6-enoic acid
  MOD_RES (11)..(11): (S)-2-amino-2-methyldec-9-enoic acid
  MOD_RES (13)..(13): (S)-2-amino-3-(benzo[b]thiophen-3-yl)propanoic acid
  C-term amino
XDIXDEAAFNXFXQ

SEQ ID NO: 313 - protein, 14 aa, Artificial Sequence
  Description of Artificial Sequence: Synthetic peptide
  N-term Acetic Acid
  MOD_RES (1)..(1): (R)-2-allylpyrrolidine-2-carboxylic acid
  MOD_RES (4)..(4): 2-amino-2-(pent-4-en-1-yl)hept-6-enoic acid
  MOD_RES (11)..(11): (S)-2-amino-2-methyldec-9-enoic acid
  MOD_RES (13)..(13): (S)-2-amino-3-(benzo[b]thiophen-3-yl)propanoic acid
  C-term amino
XDTXDEAAFQXFXQ

SEQ ID NO: 314 - protein, 14 aa, Artificial Sequence
  Description of Artificial Sequence: Synthetic peptide
  N-term Acetic Acid
  MOD_RES (1)..(1): (R)-2-allylpyrrolidine-2-carboxylic acid
  MOD_RES (4)..(4): 2-amino-2-(pent-4-en-1-yl)hept-6-enoic acid
  MOD_RES (11)..(11): (S)-2-amino-2-methyldec-9-enoic acid
  MOD_RES (13)..(13): (S)-2-amino-3-(benzo[b]thiophen-3-yl)propanoic acid
  MOD_RES (14)..(14): Nt-methyl-L-histidine
  C-term amino
XDAXDEAAFNXFXH

SEQ ID NO: 315 - protein, 14 aa, Artificial Sequence
  Description of Artificial Sequence: Synthetic peptide
  N-term Acetic Acid
  MOD_RES (1)..(1): (R)-2-allylpyrrolidine-2-carboxylic acid
  MOD_RES (4)..(4): 2-amino-2-(pent-4-en-1-yl)hept-6-enoic acid
  MOD_RES (11)..(11): (S)-2-amino-2-methyldec-9-enoic acid
  MOD_RES (13)..(13): (S)-2-amino-3-(benzo[b]thiophen-3-yl)propanoic acid
  MOD_RES (14)..(14): Np-methyl-D-histidine
  C-term amino
XDAXDEAAFNXFXH

SEQ ID NO: 316 - protein, 14 aa, Artificial Sequence
  Description of Artificial Sequence: Synthetic peptide
  N-term Acetic Acid
  MOD_RES (1)..(1): (R)-2-allylpyrrolidine-2-carboxylic acid
  MOD_RES (4)..(4): 2-amino-2-(pent-4-en-1-yl)hept-6-enoic acid
  MOD_RES (11)..(11): (S)-2-amino-2-methyldec-9-enoic acid
  MOD_RES (13)..(13): (S)-2-amino-3-(benzo[b]thiophen-3-yl)propanoic acid
  MOD_RES (14)..(14): (S)-2,4-diaminobutanoic acid
  C-term amino
XDIXDDAAFQXFXX

SEQ ID NO: 317 - protein, 14 aa, Artificial Sequence
  Description of Artificial Sequence: Synthetic peptide
  N-term Acetic Acid
  MOD_RES (1)..(1): (R)-2-allylpyrrolidine-2-carboxylic acid
  MOD_RES (4)..(4): 2-amino-2-(pent-4-en-1-yl)hept-6-enoic acid
  MOD_RES (11)..(11): (S)-2-amino-2-methyldec-9-enoic acid
  MOD_RES (12)..(12): (S)-3-acrylamido-2-aminopropanoic acid
  MOD_RES (13)..(13): (S)-2-amino-3-(benzo[b]thiophen-3-yl)propanoic acid
  C-term amino
XDIXDDAAFQXXXQ

SEQ ID NO: 318 - protein, 14 aa, Artificial Sequence
  Description of Artificial Sequence: Synthetic peptide
  N-term Acetic Acid
  MOD_RES (1)..(1): (R)-2-allylpyrrolidine-2-carboxylic acid
  MOD_RES (4)..(4): 2-amino-2-(pent-4-en-1-yl)hept-6-enoic acid
  MOD_RES (9)..(9): (S)-2-amino-3-(thiophen-2-yl)propanoic acid
  MOD_RES (11)..(11): (S)-2-amino-2-methyldec-9-enoic acid
  MOD_RES (13)..(13): (S)-2-amino-3-(benzo[b]thiophen-3-yl)propanoic acid
  C-term amino
XDIXDEAAXQXFXQ

SEQ ID NO: 319 - protein, 14 aa, Artificial Sequence
  Description of Artificial Sequence: Synthetic peptide
  N-term Acetic Acid
  MOD_RES (1)..(1): (R)-2-allylpyrrolidine-2-carboxylic acid
  MOD_RES (4)..(4): 2-amino-2-(pent-4-en-1-yl)hept-6-enoic acid
  MOD_RES (9)..(9): (S)-2-amino-3-(thiophen-2-yl)propanoic acid
  MOD_RES (11)..(11): (S)-2-amino-2-methyldec-9-enoic acid
  MOD_RES (13)..(13): (S)-2-amino-3-(benzo[b]thiophen-3-yl)propanoic acid
  C-term amino
XDAXDEAAXQXFXQ

SEQ ID NO: 320 - protein, 14 aa, Artificial Sequence
  Description of Artificial Sequence: Synthetic peptide
  N-term Acetic Acid
  MOD_RES (1)..(1): (R)-2-allylpyrrolidine-2-carboxylic acid
  MOD_RES (4)..(4): 2-amino-2-(pent-4-en-1-yl)hept-6-enoic acid
  MOD_RES (9)..(9): (S)-2-amino-3-(thiophen-2-yl)propanoic acid
  MOD_RES (11)..(11): (S)-2-amino-2-methyldec-9-enoic acid
  MOD_RES (13)..(13): (S)-2-amino-3-(benzo[b]thiophen-3-yl)propanoic acid
  C-term amino
XDIXDEAAXQXFXH

SEQ ID NO: 321 - protein, 14 aa, Artificial Sequence
  Description of Artificial Sequence: Synthetic peptide
  N-term Acetic Acid
  MOD_RES (1)..(1): (R)-2-allylpyrrolidine-2-carboxylic acid
  MOD_RES (4)..(4): 2-amino-2-(pent-4-en-1-yl)hept-6-enoic acid
  MOD_RES (9)..(9): (S)-2-amino-3-(thiophen-2-yl)propanoic acid
  MOD_RES (11)..(11): (S)-2-amino-2-methyldec-9-enoic acid
  MOD_RES (13)..(13): (S)-2-amino-3-(benzo[b]thiophen-3-yl)propanoic acid
  C-term amino
XDIXDDAAXQXFXH

SEQ ID NO: 322 - protein, 14 aa, Artificial Sequence
  Description of Artificial Sequence: Synthetic peptide
  N-term Acetic Acid
  MOD_RES (1)..(1): (R)-2-allylpyrrolidine-2-carboxylic acid
  MOD_RES (4)..(4): 2-amino-2-(pent-4-en-1-yl)hept-6-enoic acid
  MOD_RES (11)..(11): (S)-2-amino-2-methyldec-9-enoic acid
  MOD_RES (13)..(13): (S)-2-amino-3-(benzo[b]thiophen-3-yl)propanoic acid
  MOD_RES (14)..(14): (S)-2-amino-3-(furan-2-yl)propanoic acid
  C-term amino
XDAXDEAAFQXFXX

SEQ ID NO: 323 - protein, 14 aa, Artificial Sequence
  Description of Artificial Sequence: Synthetic peptide
  N-term Acetic Acid
  MOD_RES (1)..(1): (R)-2-allylpyrrolidine-2-carboxylic acid
  MOD_RES (4)..(4): 2-amino-2-(pent-4-en-1-yl)hept-6-enoic acid
  MOD_RES (11)..(11): (S)-2-amino-2-methyldec-9-enoic acid
  MOD_RES (13)..(13): (S)-2-amino-3-(benzo[b]thiophen-3-yl)propanoic acid
  MOD_RES (14)..(14): L-homoserine
  C-term amino
XDAXDEAAFQXFXS

SEQ ID NO: 324 - protein, 14 aa, Artificial Sequence
  Description of Artificial Sequence: Synthetic peptide
  N-term Acetic Acid
  MOD_RES (1)..(1): (R)-2-allylpyrrolidine-2-carboxylic acid
  MOD_RES (4)..(4): 2-amino-2-(pent-4-en-1-yl)hept-6-enoic acid
  MOD_RES (11)..(11): (S)-2-amino-2-methyldec-9-enoic acid
  MOD_RES (13)..(13): (S)-2-amino-3-(benzo[b]thiophen-3-yl)propanoic acid
  MOD_RES (14)..(14): D-serine
  C-term amino
XDAXDEAAFQXFXS

SEQ ID NO: 325 - protein, 14 aa, Artificial Sequence
  Description of Artificial Sequence: Synthetic peptide
  N-term Acetic Acid
  MOD_RES (1)..(1): (R)-2-allylpyrrolidine-2-carboxylic acid
  MOD_RES (4)..(4): 2-amino-2-(pent-4-en-1-yl)hept-6-enoic acid
  MOD_RES (11)..(11): (S)-2-amino-2-methyldec-9-enoic acid
  MOD_RES (13)..(13): (S)-2-amino-3-(benzo[b]thiophen-3-yl)propanoic acid
  MOD_RES (14)..(14): D-glutamine
  C-term amino
XDAXDEAAFQXFXQ

SEQ ID NO: 326 - protein, 14 aa, Artificial Sequence
  Description of Artificial Sequence: Synthetic peptide
  N-term Acetic Acid
  MOD_RES (1)..(1): (R)-2-allylpyrrolidine-2-carboxylic acid
  MOD_RES (4)..(4): 2-amino-2-(pent-4-en-1-yl)hept-6-enoic acid
  MOD_RES (11)..(11): (S)-2-amino-2-methyldec-9-enoic acid
  MOD_RES (13)..(13): (S)-2-amino-3-(benzo[b]thiophen-3-yl)propanoic acid
  C-term amino
XDIXDEAAFQXFXN

SEQ ID NO: 327 - protein, 14 aa, Artificial Sequence
  Description of Artificial Sequence: Synthetic peptide
  N-term Acetic Acid
  MOD_RES (1)..(1): (R)-2-allylpyrrolidine-2-carboxylic acid
  MOD_RES (4)..(4): 2-amino-2-(pent-4-en-1-yl)hept-6-enoic acid
  MOD_RES (5)..(5): L-homoserine
  MOD_RES (11)..(11): (S)-2-amino-2-methyldec-9-enoic acid
  MOD_RES (13)..(13): (S)-2-amino-3-(benzo[b]thiophen-3-yl)propanoic acid
  C-term amino
XDAXSEAAFQXFXQ

SEQ ID NO: 328 - protein, 14 aa, Artificial Sequence
  Description of Artificial Sequence: Synthetic peptide
  N-term Acetic Acid
  MOD_RES (1)..(1): (R)-2-allylpyrrolidine-2-carboxylic acid
  MOD_RES (4)..(4): 2-amino-2-(pent-4-en-1-yl)hept-6-enoic acid
  MOD_RES (6)..(6): (S)-2-amino-3-((carboxymethyl)(2,2,2-trifluoroethyl)amino) propanoic acid
  MOD_RES (11)..(11): (S)-2-amino-2-methyldec-9-enoic acid
  MOD_RES (13)..(13): (S)-2-amino-3-(benzo[b]thiophen-3-yl)propanoic acid
  C-term amino
XDAXDXAAFQXFXH

SEQ ID NO: 329 - protein, 14 aa, Artificial Sequence
  Description of Artificial Sequence: Synthetic peptide
  N-term Acetic Acid
  MOD_RES (1)..(1): (R)-2-allylpyrrolidine-2-carboxylic acid
  MOD_RES (4)..(4): 2-amino-2-(pent-4-en-1-yl)hept-6-enoic acid
  MOD_RES (6)..(6): (S)-2-amino-3-((carboxymethyl)(2,2,2-trifluoroethyl)amino) propanoic acid
  MOD_RES (11)..(11): (S)-2-amino-2-methyldec-9-enoic acid
  MOD_RES (13)..(13): (S)-2-amino-3-(benzo[b]thiophen-3-yl)propanoic acid
  C-term amino
XDIXDXAAFQXFXH

SEQ ID NO: 330 - protein, 14 aa, Artificial Sequence
  Description of Artificial Sequence: Synthetic peptide
  N-term Acetic Acid
  MOD_RES (1)..(1): (R)-2-allylpyrrolidine-2-carboxylic acid
  MOD_RES (3)..(3): (S)-2-amino-4,4,4-trifluorobutanoic acid
  MOD_RES (4)..(4): 2-amino-2-(pent-4-en-1-yl)hept-6-enoic acid
  MOD_RES (11)..(11): (S)-2-amino-2-methyldec-9-enoic acid
  MOD_RES (13)..(13): (S)-2-amino-3-(benzo[b]thiophen-3-yl)propanoic acid
  C-term amino
XDXXDEAAFQXFXQ

SEQ ID NO: 331 - protein, 14 aa, Artificial Sequence
  Description of Artificial Sequence: Synthetic peptide
  N-term Acetic Acid
  MOD_RES (1)..(1): (R)-2-allylpyrrolidine-2-carboxylic acid
  MOD_RES (3)..(3): (S)-2-amino-4,4-difluorobutanoic acid
  MOD_RES (4)..(4): 2-amino-2-(pent-4-en-1-yl)hept-6-enoic acid
  MOD_RES (11)..(11): (S)-2-amino-2-methyldec-9-enoic acid
  MOD_RES (13)..(13): (S)-2-amino-3-(benzo[b]thiophen-3-yl)propanoic acid
  C-term amino
XDXXDEAAFQXFXQ

SEQ ID NO: 332 - protein, 14 aa, Artificial Sequence
  Description of Artificial Sequence: Synthetic peptide
  N-term Acetic Acid
  MOD_RES (1)..(1): (R)-2-allylpyrrolidine-2-carboxylic acid
  MOD_RES (3)..(3): (S)-2-amino-4,4,4-trifluorobutanoic acid
  MOD_RES (4)..(4): 2-amino-2-(pent-4-en-1-yl)hept-6-enoic acid
  MOD_RES (11)..(11): (S)-2-amino-2-methyldec-9-enoic acid
  MOD_RES (13)..(13): (S)-2-amino-3-(benzo[b]thiophen-3-yl)propanoic acid
  C-term amino
XDXXDEAAFQXFXH

SEQ ID NO: 333 - protein, 14 aa, Artificial Sequence
  Description of Artificial Sequence: Synthetic peptide
  N-term Acetic Acid
  MOD_RES (1)..(1): (R)-2-allylpyrrolidine-2-carboxylic acid
  MOD_RES (4)..(4): 2-amino-2-(pent-4-en-1-yl)hept-6-enoic acid
  MOD_RES (11)..(11): (S)-2-amino-2-methyldec-9-enoic acid
  MOD_RES (13)..(13): (S)-2-amino-3-(benzo[b]thiophen-3-yl)propanoic acid
  C-term amino
XDLXDEAAFQXFXQ

SEQ ID NO: 334 - protein, 14 aa, Artificial Sequence
  Description of Artificial Sequence: Synthetic peptide
  N-term Acetic Acid
  MOD_RES (1)..(1): (R)-2-allylpyrrolidine-2-carboxylic acid
  MOD_RES (4)..(4): 2-amino-2-(pent-4-en-1-yl)hept-6-enoic acid
  MOD_RES (11)..(11): (S)-2-amino-2-methyldec-9-enoic acid
  MOD_RES (13)..(13): (S)-2-amino-3-(benzo[b]thiophen-3-yl)propanoic acid
  C-term amino
XDLXDEAAFQXFXH

SEQ ID NO: 335 - protein, 14 aa, Artificial Sequence
  Description of Artificial Sequence: Synthetic peptide
  N-term Acetic Acid
  MOD_RES (1)..(1): (R)-2-allylpyrrolidine-2-carboxylic acid
  MOD_RES (4)..(4): 2-amino-2-(pent-4-en-1-yl)hept-6-enoic acid
  MOD_RES (11)..(11): (S)-2-amino-2-methyldec-9-enoic acid
  MOD_RES (13)..(13): (S)-2-amino-3-(benzo[b]thiophen-3-yl)propanoic acid
  C-term amino
XDAXDEAAFQXFXT

SEQ ID NO: 336 - protein, 14 aa, Artificial Sequence
  Description of Artificial Sequence: Synthetic peptide
  N-term Acetic Acid
  MOD_RES (1)..(1): (R)-2-allylpyrrolidine-2-carboxylic acid
  MOD_RES (4)..(4): 2-amino-2-(pent-4-en-1-yl)hept-6-enoic acid
  MOD_RES (11)..(11): (S)-2-amino-2-methyldec-9-enoic acid
  MOD_RES (13)..(13): (S)-2-amino-3-(benzo[b]thiophen-3-yl)propanoic acid
  MOD_RES (14)..(14): (S)-2-aminobutanoic acid
  C-term amino
XDAXDEAAFQXFXX

SEQ ID NO: 337 - protein, 14 aa, Artificial Sequence
  Description of Artificial Sequence: Synthetic peptide
  N-term Acetic Acid
  MOD_RES (1)..(1): (R)-2-allylpyrrolidine-2-carboxylic acid
  MOD_RES (4)..(4): 2-amino-2-(pent-4-en-1-yl)hept-6-enoic acid
  MOD_RES (11)..(11): (S)-2-amino-2-methyldec-9-enoic acid
  MOD_RES (12)..(12): (S)-2-amino-3-(2-methoxyphenyl)propanoic acid
  MOD_RES (13)..(13): (S)-2-amino-3-(benzo[b]thiophen-3-yl)propanoic acid
  C-term amino
XDAXDEAAFNXFXH

SEQ ID NO: 338 - protein, 14 aa, Artificial Sequence
  Description of Artificial Sequence: Synthetic peptide
  N-term Acetic Acid
  MOD_RES (1)..(1): (R)-2-allylpyrrolidine-2-carboxylic acid
  MOD_RES (4)..(4): 2-amino-2-(pent-4-en-1-yl)hept-6-enoic acid
  MOD_RES (11)..(11): (S)-2-amino-2-methyldec-9-enoic acid
  MOD_RES (12)..(12): (S)-2-amino-3-(2-methoxyphenyl)propanoic acid
  MOD_RES (13)..(13): (S)-2-amino-3-(benzo[b]thiophen-3-yl)propanoic acid
  C-term amino
XDIXDEAAFNXFXH

SEQ ID NO: 339 - protein, 14 aa, Artificial Sequence
  Description of Artificial Sequence: Synthetic peptide
  N-term Acetic Acid
  MOD_RES (1)..(1): (R)-2-allylpyrrolidine-2-carboxylic acid
  MOD_RES (4)..(4): 2-amino-2-(pent-4-en-1-yl)hept-6-enoic acid
  MOD_RES (11)..(11): (S)-2-amino-2-methyldec-9-enoic acid
  MOD_RES (12)..(12): (S)-2-amino-3-(2-carbamoylphenyl)propanoic acid
  MOD_RES (13)..(13): (S)-2-amino-3-(benzo[b]thiophen-3-yl)propanoic acid
  C-term amino
XDAXDEAAFNXFXH

SEQ ID NO: 340 - protein, 14 aa, Artificial Sequence
  Description of Artificial Sequence: Synthetic peptide
  N-term Acetic Acid
  MOD_RES (1)..(1): (R)-2-allylpyrrolidine-2-carboxylic acid
  MOD_RES (4)..(4): 2-amino-2-(pent-4-en-1-yl)hept-6-enoic acid
  MOD_RES (11)..(11): (S)-2-amino-2-methyldec-9-enoic acid
  MOD_RES (12)..(12): (S)-2-amino-3-(2-carbamoylphenyl)propanoic acid
  MOD_RES (13)..(13): (S)-2-amino-3-(benzo[b]thiophen-3-yl)propanoic acid
  C-term amino
XDIXDEAAFNXFXH

SEQ ID NO: 341 - protein, 14 aa, Artificial Sequence
  Description of Artificial Sequence: Synthetic peptide
  N-term Acetic Acid
  MOD_RES (1)..(1): (R)-2-allylpyrrolidine-2-carboxylic acid
  MOD_RES (4)..(4): 2-amino-2-(pent-4-en-1-yl)hept-6-enoic acid
  MOD_RES (11)..(11): (S)-2-amino-2-methyldec-9-enoic acid
  MOD_RES (12)..(12): (S)-2-amino-3-(thiophen-3-yl)propanoic acid
  MOD_RES (13)..(13): (S)-2-amino-3-(benzo[b]thiophen-3-yl)propanoic acid
  C-term amino
XDAXDEAAFNXXXH

SEQ ID NO: 342 - protein, 14 aa, Artificial Sequence
  Description of Artificial Sequence: Synthetic peptide
  N-term Acetic Acid
  MOD_RES (1)..(1): (R)-2-allylpyrrolidine-2-carboxylic acid
  MOD_RES (4)..(4): 2-amino-2-(pent-4-en-1-yl)hept-6-enoic acid
  MOD_RES (11)..(11): (S)-2-amino-2-methyldec-9-enoic acid
  MOD_RES (12)..(12): (S)-2-amino-3-(thiophen-3-yl)propanoic acid
  MOD_RES (13)..(13): (S)-2-amino-3-(benzo[b]thiophen-3-yl)propanoic acid
  C-term amino
XDIXDEAAFNXXXH

SEQ ID NO: 343 - protein, 14 aa, Artificial Sequence
  Description of Artificial Sequence: Synthetic peptide
  N-term Acetic Acid
  MOD_RES (1)..(1): (R)-2-allylpyrrolidine-2-carboxylic acid
  MOD_RES (4)..(4): 2-amino-2-(pent-4-en-1-yl)hept-6-enoic acid
  MOD_RES (11)..(11): (S)-2-amino-2-methyldec-9-enoic acid
  MOD_RES (12)..(12): (S)-2-amino-3-(thiophen-3-yl)propanoic acid
  MOD_RES (13)..(13): (S)-2-amino-3-(benzo[b]thiophen-3-yl)propanoic acid
  C-term amino
XDAXDEAAFNXXXQ

SEQ ID NO: 344 - protein, 14 aa, Artificial Sequence
  Description of Artificial Sequence: Synthetic peptide
  N-term Acetic Acid
  MOD_RES (1)..(1): (R)-2-allylpyrrolidine-2-carboxylic acid
  MOD_RES (4)..(4): 2-amino-2-(pent-4-en-1-yl)hept-6-enoic acid
  MOD_RES (11)..(11): (S)-2-amino-2-methyldec-9-enoic acid
  MOD_RES (12)..(12): (S)-2-amino-3-(thiophen-3-yl)propanoic acid
  MOD_RES (13)..(13): (S)-2-amino-3-(benzo[b]thiophen-3-yl)propanoic acid
  C-term amino
XDIXDEAAFNXXXQ

SEQ ID NO: 345 - protein, 14 aa, Artificial Sequence
  Description of Artificial Sequence: Synthetic peptide
  N-term Acetic Acid
  MOD_RES (1)..(1): (R)-2-allylpyrrolidine-2-carboxylic acid
  MOD_RES (3)..(3): (S)-2-aminopentanoic acid
  MOD_RES (4)..(4): 2-amino-2-(pent-4-en-1-yl)hept-6-enoic acid
  MOD_RES (11)..(11): (S)-2-amino-2-methyldec-9-enoic acid
  MOD_RES (13)..(13): (S)-2-amino-3-(benzo[b]thiophen-3-yl)propanoic acid
  C-term amino
XDXXDEAAFQXFXQ

SEQ ID NO: 346 - protein, 14 aa, Artificial Sequence
  Description of Artificial Sequence: Synthetic peptide
  N-term Acetic Acid
  MOD_RES (1)..(1): (R)-2-allylpyrrolidine-2-carboxylic acid
  MOD_RES (4)..(4): 2-amino-2-(pent-4-en-1-yl)hept-6-enoic acid
  MOD_RES (9)..(9): (S)-2-amino-3-(thiazol-4-yl)propanoic acid
  MOD_RES (11)..(11): (S)-2-amino-2-methyldec-9-enoic acid
  MOD_RES (13)..(13): (S)-2-amino-3-(benzo[b]thiophen-3-yl)propanoic acid
  C-term amino
XDAXDEAAXNXFXQ

SEQ ID NO: 347 - protein, 14 aa, Artificial Sequence
  Description of Artificial Sequence: Synthetic peptide
  N-term Acetic Acid
  MOD_RES (1)..(1): (R)-2-allylpyrrolidine-2-carboxylic acid
  MOD_RES (4)..(4): 2-amino-2-(pent-4-en-1-yl)hept-6-enoic acid
  MOD_RES (11)..(11): (S)-2-amino-2-methyldec-9-enoic acid
  MOD_RES (12)..(12): (S)-2-amino-3-(2-methoxyphenyl)propanoic acid
  MOD_RES (13)..(13): (S)-2-amino-3-(benzo[b]thiophen-3-yl)propanoic acid
  C-term amino
XDAXDEAAFQXFXQ

SEQ ID NO: 348 - protein, 14 aa, Artificial Sequence
  Description of Artificial Sequence: Synthetic peptide
  N-term Acetic Acid
  MOD_RES (1)..(1): (R)-2-allylpyrrolidine-2-carboxylic acid
  MOD_RES (4)..(4): 2-amino-2-(pent-4-en-1-yl)hept-6-enoic acid
  MOD_RES (11)..(11): (S)-2-amino-2-methyldec-9-enoic acid
  MOD_RES (12)..(12): (S)-2-amino-3-(2-methoxyphenyl)propanoic acid
  MOD_RES (13)..(13): (S)-2-amino-3-(benzo[b]thiophen-3-yl)propanoic acid
  C-term amino
XDIXDEAAFQXFXQ

SEQ ID NO: 349 - protein, 14 aa, Artificial Sequence
  Description of Artificial Sequence: Synthetic peptide
  N-term Acetic Acid
  MOD_RES (1)..(1): (R)-2-allylpyrrolidine-2-carboxylic acid
  MOD_RES (4)..(4): 2-amino-2-(pent-4-en-1-yl)hept-6-enoic acid
  MOD_RES (5)..(5): (S)-2-amino-3-(methylsulfonamido)propanoic acid
  MOD_RES (11)..(11): (S)-2-amino-2-methyldec-9-enoic acid
  MOD_RES (13)..(13): (S)-2-amino-3-(benzo[b]thiophen-3-yl)propanoic acid
  C-term amino
XDAXXEAAFNXFXQ

SEQ ID NO: 350 - protein, 14 aa, Artificial Sequence
  Description of Artificial Sequence: Synthetic peptide
  N-term Acetic Acid
  MOD_RES (1)..(1): (R)-2-allylpyrrolidine-2-carboxylic acid
  MOD_RES (4)..(4): 2-amino-2-(pent-4-en-1-yl)hept-6-enoic acid
  MOD_RES (5)..(5): (S)-2-amino-4-(methylsulfonamido)butanoic acid
  MOD_RES (11)..(11): (S)-2-amino-2-methyldec-9-enoic acid
  MOD_RES (13)..(13): (S)-2-amino-3-(benzo[b]thiophen-3-yl)propanoic acid
  C-term amino
XDAXXEAAFNXFXQ

SEQ ID NO: 351 - protein, 14 aa, Artificial Sequence
  Description of Artificial Sequence: Synthetic peptide
  N-term Acetic Acid
  MOD_RES (1)..(1): (R)-2-allylpyrrolidine-2-carboxylic acid
  MOD_RES (4)..(4): 2-amino-2-(pent-4-en-1-yl)hept-6-enoic acid
  MOD_RES (6)..(6): (S)-2-amino-3-(methylsulfonamido)propanoic acid
  MOD_RES (11)..(11): (S)-2-amino-2-methyldec-9-enoic acid
  MOD_RES (13)..(13): (S)-2-amino-3-(benzo[b]thiophen-3-yl)propanoic acid
  C-term amino
XDAXDXAAFNXFXQ

SEQ ID NO: 352 - protein, 14 aa, Artificial Sequence
  Description of Artificial Sequence: Synthetic peptide
  N-term Acetic Acid
  MOD_RES (1)..(1): (R)-2-allylpyrrolidine-2-carboxylic acid
  MOD_RES (2)..(2): (S)-2-amino-3-(methylsulfonamido)propanoic acid
  MOD_RES (4)..(4): 2-amino-2-(pent-4-en-1-yl)hept-6-enoic acid
  MOD_RES (11)..(11): (S)-2-amino-2-methyldec-9-enoic acid
  MOD_RES (13)..(13): (S)-2-amino-3-(benzo[b]thiophen-3-yl)propanoic acid
  C-term amino
XXAXDEAAFNXFXQ

SEQ ID NO: 353 - protein, 14 aa, Artificial Sequence
  Description of Artificial Sequence: Synthetic peptide
  N-term Acetic Acid
  MOD_RES (1)..(1): (R)-2-allylpyrrolidine-2-carboxylic acid
  MOD_RES (4)..(4): 2-amino-2-(pent-4-en-1-yl)hept-6-enoic acid
  MOD_RES (5)..(5): N4-isopropyl-L-asparagine
  MOD_RES (11)..(11): (S)-2-amino-2-methyldec-9-enoic acid
  MOD_RES (13)..(13): (S)-2-amino-3-(benzo[b]thiophen-3-yl)propanoic acid
  C-term amino
XDAXNDAAFVXFXQ

SEQ ID NO: 354 - protein, 14 aa, Artificial Sequence
  Description of Artificial Sequence: Synthetic peptide
  N-term Acetic Acid
  MOD_RES (1)..(1): (R)-2-allylpyrrolidine-2-carboxylic acid
  MOD_RES (4)..(4): 2-amino-2-(pent-4-en-1-yl)hept-6-enoic acid
  MOD_RES (5)..(5): N4-ethyl-L-asparagine
  MOD_RES (11)..(11): (S)-2-amino-2-methyldec-9-enoic acid
  MOD_RES (13)..(13): (S)-2-amino-3-(benzo[b]thiophen-3-yl)propanoic acid
  C-term amino
XDAXNDAAFVXFXQ

SEQ ID NO: 355 - protein, 14 aa, Artificial Sequence
  Description of Artificial Sequence: Synthetic peptide
  N-term Acetic Acid
  MOD_RES (1)..(1): (R)-2-allylpyrrolidine-2-carboxylic acid
  MOD_RES (4)..(4): 2-amino-2-(pent-4-en-1-yl)hept-6-enoic acid
  MOD_RES (5)..(5): N4-propyl-L-asparagine
  MOD_RES (11)..(11): (S)-2-amino-2-methyldec-9-enoic acid
  MOD_RES (13)..(13): (S)-2-amino-3-(benzo[b]thiophen-3-yl)propanoic acid
  C-term amino
XDAXNDAAFVXFXQ

SEQ ID NO: 356 - protein, 14 aa, Artificial Sequence
  Description of Artificial Sequence: Synthetic peptide
  N-term Acetic Acid
  MOD_RES (1)..(1): (R)-2-allylpyrrolidine-2-carboxylic acid
  MOD_RES (4)..(4): 2-amino-2-(pent-4-en-1-yl)hept-6-enoic acid
  MOD_RES (5)..(5): N4-cyclopropyl-L-asparagine
  MOD_RES (11)..(11): (S)-2-amino-2-methyldec-9-enoic acid
  MOD_RES (13)..(13): (S)-2-amino-3-(benzo[b]thiophen-3-yl)propanoic acid
  C-term amino
XDAXNDAAFVXFXQ

SEQ ID NO: 357 - protein, 14 aa, Artificial Sequence
  Description of Artificial Sequence: Synthetic peptide
  N-term Acetic Acid
  MOD_RES (1)..(1): (R)-2-allylpyrrolidine-2-carboxylic acid
  MOD_RES (4)..(4): 2-amino-2-(pent-4-en-1-yl)hept-6-enoic acid
  MOD_RES (5)..(5): N4-cyclobutyl-L-asparagine
  MOD_RES (11)..(11): (S)-2-amino-2-methyldec-9-enoic acid
  MOD_RES (13)..(13): (S)-2-amino-3-(benzo[b]thiophen-3-yl)propanoic acid
  C-term amino
XDAXNDAAFVXFXQ

SEQ ID NO: 358 - protein, 14 aa, Artificial Sequence
  Description of Artificial Sequence: Synthetic peptide
  N-term Acetic Acid
  MOD_RES (1)..(1): (R)-2-allylpyrrolidine-2-carboxylic acid
  MOD_RES (4)..(4): 2-amino-2-(pent-4-en-1-yl)hept-6-enoic acid
  MOD_RES (5)..(5): N4-methyl-L-asparagine
  MOD_RES (11)..(11): (S)-2-amino-2-methyldec-9-enoic acid
  MOD_RES (13)..(13): (S)-2-amino-3-(benzo[b]thiophen-3-yl)propanoic acid
  C-term amino
XDAXNDAAFVXFXQ

SEQ ID NO: 359 - protein, 14 aa, Artificial Sequence
  Description of Artificial Sequence: Synthetic peptide
  N-term Acetic Acid
  MOD_RES (1)..(1): (R)-2-allylpyrrolidine-2-carboxylic acid
  MOD_RES (3)..(3): O-methyl-L-threonine
  MOD_RES (4)..(4): 2-amino-2-(pent-4-en-1-yl)hept-6-enoic acid
  MOD_RES (11)..(11): (S)-2-amino-2-methyldec-9-enoic acid
  MOD_RES (13)..(13): (S)-2-amino-3-(benzo[b]thiophen-3-yl)propanoic acid
  C-term amino
XDTXDEAAFQXFXQ

SEQ ID NO: 360 - protein, 14 aa, Artificial Sequence
  Description of Artificial Sequence: Synthetic peptide
  N-term Acetic Acid
  MOD_RES (1)..(1): (R)-2-allylpyrrolidine-2-carboxylic acid
  MOD_RES (4)..(4): 2-amino-2-(pent-4-en-1-yl)hept-6-enoic acid
  MOD_RES (11)..(11): (S)-2-amino-2-methyldec-9-enoic acid
  MOD_RES (13)..(13): (S)-2-amino-3-(benzo[b]thiophen-3-yl)propanoic acid
  C-term amino
XDLXDEAAFNXFXH

SEQ ID NO: 361 - protein, 14 aa, Artificial Sequence
  Description of Artificial Sequence: Synthetic peptide
  N-term Acetic Acid
  MOD_RES (1)..(1): (R)-2-allylpyrrolidine-2-carboxylic acid
  MOD_RES (3)..(3): (S)-2-amino-4,4-dimethylpentanoic acid
  MOD_RES (4)..(4): 2-amino-2-(pent-4-en-1-yl)hept-6-enoic acid
  MOD_RES (11)..(11): (S)-2-amino-2-methyldec-9-enoic acid
  MOD_RES (13)..(13): (S)-2-amino-3-(benzo[b]thiophen-3-yl)propanoic acid
  C-term amino
XDXXDEAAFQXFXQ

SEQ ID NO: 362 - protein, 14 aa, Artificial Sequence
  Description of Artificial Sequence: Synthetic peptide
  N-term Acetic Acid
  MOD_RES (1)..(1): (R)-2-allylpyrrolidine-2-carboxylic acid
  MOD_RES (3)..(3): (S)-2-amino-5-methylhexanoic acid
  MOD_RES (4)..(4): 2-amino-2-(pent-4-en-1-yl)hept-6-enoic acid
  MOD_RES (11)..(11): (S)-2-amino-2-methyldec-9-enoic acid
  MOD_RES (13)..(13): (S)-2-amino-3-(benzo[b]thiophen-3-yl)propanoic acid
  C-term amino
XDXXDEAAFQXFXQ

SEQ ID NO: 363 - protein, 14 aa, Artificial Sequence
  Description of Artificial Sequence: Synthetic peptide
  N-term Acetic Acid
  MOD_RES (1)..(1): (R)-2-allylpyrrolidine-2-carboxylic acid
  MOD_RES (3)..(3): (S)-2-amino-4,4-dimethylpentanoic acid
  MOD_RES (4)..(4): 2-amino-2-(pent-4-en-1-yl)hept-6-enoic acid
  MOD_RES (11)..(11): (S)-2-amino-2-methyldec-9-enoic acid
  MOD_RES (13)..(13): (S)-2-amino-3-(benzo[b]thiophen-3-yl)propanoic acid
  C-term amino
XDXXDDAAFNXFXQ

SEQ ID NO: 364 - protein, 14 aa, Artificial Sequence
  Description of Artificial Sequence: Synthetic peptide
  N-term Acetic Acid
  MOD_RES (1)..(1): (R)-2-allylpyrrolidine-2-carboxylic acid
  MOD_RES (3)..(3): (S)-2-amino-5-methylhexanoic acid
  MOD_RES (4)..(4): 2-amino-2-(pent-4-en-1-yl)hept-6-enoic acid
  MOD_RES (11)..(11): (S)-2-amino-2-methyldec-9-enoic acid
  MOD_RES (13)..(13): (S)-2-amino-3-(benzo[b]thiophen-3-yl)propanoic acid
  C-term amino
XDXXDDAAFNXFXQ

SEQ ID NO: 365 - protein, 14 aa, Artificial Sequence
  Description of Artificial Sequence: Synthetic peptide
  N-term Acetic Acid
  MOD_RES (1)..(1): (R)-2-allylpyrrolidine-2-carboxylic acid
  MOD_RES (4)..(4): 2-amino-2-(pent-4-en-1-yl)hept-6-enoic acid
  MOD_RES (11)..(11): (S)-2-amino-2-methyldec-9-enoic acid
  MOD_RES (12)..(12): (S)-2-amino-3-(2-methoxyphenyl)propanoic acid
  MOD_RES (13)..(13): (S)-2-amino-3-(benzo[b]thiophen-3-yl)propanoic acid
  C-term amino
XDIXDDAAFNXFXQ

SEQ ID NO: 366 - protein, 14 aa, Artificial Sequence
  Description of Artificial Sequence: Synthetic peptide
  N-term Acetic Acid
  MOD_RES (1)..(1): (R)-2-allylpyrrolidine-2-carboxylic acid
  MOD_RES (4)..(4): 2-amino-2-(pent-4-en-1-yl)hept-6-enoic acid
  MOD_RES (11)..(11): (S)-2-amino-2-methyldec-9-enoic acid
  MOD_RES (12)..(12): (S)-2-amino-3-(thiophen-3-yl)propanoic acid
  MOD_RES (13)..(13): (S)-2-amino-3-(benzo[b]thiophen-3-yl)propanoic acid
  C-term amino
XDIXDDAAFNXXXQ

SEQ ID NO: 367 - protein, 14 aa, Artificial Sequence
  Description of Artificial Sequence: Synthetic peptide
  N-term Acetic Acid
  MOD_RES (1)..(1): (R)-2-allylpyrrolidine-2-carboxylic acid
  MOD_RES (4)..(4): 2-amino-2-(pent-4-en-1-yl)hept-6-enoic acid
  MOD_RES (11)..(11): (S)-2-amino-2-methyldec-9-enoic acid
  MOD_RES (12)..(12): (S)-2-amino-3-(2-methoxyphenyl)propanoic acid
  MOD_RES (13)..(13): (S)-2-amino-3-(benzo[b]thiophen-3-yl)propanoic acid
  C-term amino
XDIXDDAAFNXFXH

SEQ ID NO: 368 - protein, 14 aa, Artificial Sequence
  Description of Artificial Sequence: Synthetic peptide
  N-term Acetic Acid
  MOD_RES (1)..(1): (R)-2-allylpyrrolidine-2-carboxylic acid
  MOD_RES (4)..(4): 2-amino-2-(pent-4-en-1-yl)hept-6-enoic acid
  MOD_RES (11)..(11): (S)-2-amino-2-methyldec-9-enoic acid
  MOD_RES (12)..(12): (S)-2-amino-3-(thiophen-3-yl)propanoic acid
  MOD_RES (13)..(13): (S)-2-amino-3-(benzo[b]thiophen-3-yl)propanoic acid
  C-term amino
XDIXDDAAFNXXXH

SEQ ID NO: 369 - protein, 14 aa, Artificial Sequence
  Description of Artificial Sequence: Synthetic peptide
  N-term Acetic Acid
  MOD_RES (1)..(1): (R)-2-allylpyrrolidine-2-carboxylic acid
  MOD_RES (4)..(4): 2-amino-2-(pent-4-en-1-yl)hept-6-enoic acid
  MOD_RES (11)..(11): (S)-2-amino-2-methyldec-9-enoic acid
  MOD_RES (13)..(13): (S)-2-amino-3-(benzo[b]thiophen-3-yl)propanoic acid
  C-term amino
XDIXDEAAFNXFXQ

SEQ ID NO: 370 - protein, 14 aa, Artificial Sequence
  Description of Artificial Sequence: Synthetic peptide
  N-term Acetic Acid
  MOD_RES (1)..(1): (R)-2-allylpyrrolidine-2-carboxylic acid
  MOD_RES (4)..(4): 2-amino-2-(pent-4-en-1-yl)hept-6-enoic acid
  MOD_RES (11)..(11): (S)-2-amino-2-methyldec-9-enoic acid
  MOD_RES (13)..(13): (S)-2-amino-3-(benzo[b]thiophen-3-yl)propanoic acid
  C-term amino
XDLXDDAAFQXFXQ

SEQ ID NO: 371 - protein, 14 aa, Artificial Sequence
  Description of Artificial Sequence: Synthetic peptide
  N-term Acetic Acid
  MOD_RES (1)..(1): (R)-2-allylpyrrolidine-2-carboxylic acid
  MOD_RES (4)..(4): 2-amino-2-(pent-4-en-1-yl)hept-6-enoic acid
  MOD_RES (11)..(11): (S)-2-amino-2-methyldec-9-enoic acid
  MOD_RES (13)..(13): (S)-2-amino-3-(benzo[b]thiophen-3-yl)propanoic acid
  C-term amino
XDLXDDAAFQXFXH

SEQ ID NO: 372 - protein, 14 aa, Artificial Sequence
  Description of Artificial Sequence: Synthetic peptide
  N-term Acetic Acid
  MOD_RES (1)..(1): (R)-2-allylpyrrolidine-2-carboxylic acid
  MOD_RES (4)..(4): 2-amino-2-(pent-4-en-1-yl)hept-6-enoic acid
  MOD_RES (11)..(11): (S)-2-amino-2-methyldec-9-enoic acid
  MOD_RES (13)..(13): (S)-2-amino-3-(benzo[b]thiophen-3-yl)propanoic acid
  C-term amino
XDLXDDAAFNXFXQ

SEQ ID NO: 373 - protein, 14 aa, Artificial Sequence
  Description of Artificial Sequence: Synthetic peptide
  N-term Acetic Acid
  MOD_RES (1)..(1): (R)-2-allylpyrrolidine-2-carboxylic acid
  MOD_RES (4)..(4): 2-amino-2-(pent-4-en-1-yl)hept-6-enoic acid
  MOD_RES (11)..(11): (S)-2-amino-2-methyldec-9-enoic acid
  MOD_RES (13)..(13): (S)-2-amino-3-(benzo[b]thiophen-3-yl)propanoic acid
  C-term amino
XDLXDDAAFNXFXH

SEQ ID NO: 374 - protein, 14 aa, Artificial Sequence
  Description of Artificial Sequence: Synthetic peptide
  N-term Acetic Acid
  MOD_RES (1)..(1): (R)-2-allylpyrrolidine-2-carboxylic acid
  MOD_RES (4)..(4): 2-amino-2-(pent-4-en-1-yl)hept-6-enoic acid
  MOD_RES (11)..(11): (S)-2-amino-2-methyldec-9-enoic acid
  MOD_RES (13)..(13): (S)-2-amino-3-(benzo[b]thiophen-3-yl)propanoic acid
  C-term amino
XDVXDDAAFNXFXQ

SEQ ID NO: 375 - protein, 14 aa, Artificial Sequence
  Description of Artificial Sequence: Synthetic peptide
  N-term Acetic Acid
  MOD_RES (1)..(1): (R)-2-allylpyrrolidine-2-carboxylic acid
  MOD_RES (3)..(3): (S)-2-aminobutanoic acid
  MOD_RES (4)..(4): 2-amino-2-(pent-4-en-1-yl)hept-6-enoic acid
  MOD_RES (11)..(11): (S)-2-amino-2-methyldec-9-enoic acid
  MOD_RES (13)..(13): (S)-2-amino-3-(benzo[b]thiophen-3-yl)propanoic acid
  C-term amino
XDXXDEAAFQXFXQ

SEQ ID NO: 376 - protein, 14 aa, Artificial Sequence
  Description of Artificial Sequence: Synthetic peptide
  N-term Acetic Acid
  MOD_RES (1)..(1): (R)-2-allylpyrrolidine-2-carboxylic acid
  MOD_RES (3)..(3): (S)-2-aminobutanoic acid
  MOD_RES (4)..(4): 2-amino-2-(pent-4-en-1-yl)hept-6-enoic acid
  MOD_RES (11)..(11): (S)-2-amino-2-methyldec-9-enoic acid
  MOD_RES (13)..(13): (S)-2-amino-3-(benzo[b]thiophen-3-yl)propanoic acid
  C-term amino
XDXXDEAAFQXFXH

SEQ ID NO: 377 - protein, 14 aa, Artificial Sequence
  Description of Artificial Sequence: Synthetic peptide
  N-term Acetic Acid
  MOD_RES (1)..(1): (R)-2-allylpyrrolidine-2-carboxylic acid
  MOD_RES (3)..(3): (S)-2-aminobutanoic acid
  MOD_RES (4)..(4): 2-amino-2-(pent-4-en-1-yl)hept-6-enoic acid
  MOD_RES (11)..(11): (S)-2-amino-2-methyldec-9-enoic acid
  MOD_RES (13)..(13): (S)-2-amino-3-(benzo[b]thiophen-3-yl)propanoic acid
  C-term amino
XDXXDDAAFNXFXQ

SEQ ID NO: 378 - protein, 14 aa, Artificial Sequence
  Description of Artificial Sequence: Synthetic peptide
  N-term Acetic Acid
  MOD_RES (1)..(1): (R)-2-allylpyrrolidine-2-carboxylic acid
  MOD_RES (3)..(3): (S)-2-aminobutanoic acid
  MOD_RES (4)..(4): 2-amino-2-(pent-4-en-1-yl)hept-6-enoic acid
  MOD_RES (11)..(11): (S)-2-amino-2-methyldec-9-enoic acid
  MOD_RES (13)..(13): (S)-2-amino-3-(benzo[b]thiophen-3-yl)propanoic acid
  C-term amino
XDXXDDAAFNXFXH

SEQ ID NO: 379 - protein, 14 aa, Artificial Sequence
  Description of Artificial Sequence: Synthetic peptide
  N-term Acetic Acid
  MOD_RES (1)..(1): (R)-2-allylpyrrolidine-2-carboxylic acid
  MOD_RES (4)..(4): 2-amino-2-(pent-4-en-1-yl)hept-6-enoic acid
  MOD_RES (11)..(11): (S)-2-amino-2-methyldec-9-enoic acid
  MOD_RES (13)..(13): (S)-2-amino-3-(benzo[b]thiophen-3-yl)propanoic acid
  C-term amino
XDLXDEAAFNXFXQ

SEQ ID NO: 380 - protein, 14 aa, Artificial Sequence
  Description of Artificial Sequence: Synthetic peptide
  N-term Acetic Acid
  MOD_RES (4)..(4): (R)-2-amino-2-methyldec-9-enoic acid
  MOD_RES (11)..(11): (S)-1-((allyloxy)carbonyl)-3-aminopyrrolidine-3-carboxylic acid
  C-term amino
FDAXDDAAFQXFWQ

SEQ ID NO: 381 - protein, 14 aa, Artificial Sequence
  Description of Artificial Sequence: Synthetic peptide
  N-term Acetic Acid
  MOD_RES (1)..(1): (R)-2-allylpyrrolidine-2-carboxylic acid
  MOD_RES (4)..(4): 2-amino-2-(pent-4-en-1-yl)hept-6-enoic acid
  MOD_RES (11)..(11): (S)-2-amino-2-methyldec-9-enoic acid
  MOD_RES (13)..(13): (S)-2-amino-3-(benzo[b]thiophen-3-yl)propanoic acid
  C-term amino
XDIXDDAAFQXFXH

SEQ ID NO: 382 - protein, 14 aa, Artificial Sequence
  Description of Artificial Sequence: Synthetic peptide
  N-term Acetic Acid
  MOD_RES (1)..(1): (R)-2-allylpyrrolidine-2-carboxylic acid
  MOD_RES (3)..(3): (S)-2-amino-4,4-dimethylpentanoic acid
  MOD_RES (4)..(4): 2-amino-2-(pent-4-en-1-yl)hept-6-enoic acid
  MOD_RES (11)..(11): (S)-2-amino-2-methyldec-9-enoic acid
  MOD_RES (13)..(13): (S)-2-amino-3-(benzo[b]thiophen-3-yl)propanoic acid
  C-term amino
XDXXDDAAFNXFXH

SEQ ID NO: 383 - protein, 14 aa, Artificial Sequence
  Description of Artificial Sequence: Synthetic peptide
  N-term Acetic Acid
  MOD_RES (1)..(1): (R)-2-allylpyrrolidine-2-carboxylic acid
  MOD_RES (3)..(3): (S)-2-amino-5-methylhexanoic acid
  MOD_RES (4)..(4): 2-amino-2-(pent-4-en-1-yl)hept-6-enoic acid
  MOD_RES (11)..(11): (S)-2-amino-2-methyldec-9-enoic acid
  MOD_RES (13)..(13): (S)-2-amino-3-(benzo[b]thiophen-3-yl)propanoic acid
  C-term amino
XDXXDDAAFNXFXH

SEQ ID NO: 384 - protein, 14 aa, Artificial Sequence
  Description of Artificial Sequence: Synthetic peptide
  N-term Acetic Acid
  MOD_RES (1)..(1): (R)-2-allylpyrrolidine-2-carboxylic acid
  MOD_RES (4)..(4): 2-amino-2-(pent-4-en-1-yl)hept-6-enoic acid
  MOD_RES (9)..(9): (S)-2-amino-3-(benzo[b]thiophen-3-yl)propanoic acid
  MOD_RES (11)..(11): (S)-2-amino-2-methyldec-9-enoic acid
  C-term amino
XDIXDEAAXQXFFQ

SEQ ID NO: 385 - protein, 14 aa, Artificial Sequence
  Description of Artificial Sequence: Synthetic peptide
  N-term Acetic Acid
  MOD_RES (1)..(1): (R)-2-allylpyrrolidine-2-carboxylic acid
  MOD_RES (4)..(4): 2-amino-2-(pent-4-en-1-yl)hept-6-enoic acid
  MOD_RES (11)..(11): (S)-2-amino-2-methyldec-9-enoic acid
  MOD_RES (13)..(13): (S)-2-amino-3-(benzo[b]thiophen-3-yl)propanoic acid
  C-term amino
XDIXFEAAFQXDXQ

SEQ ID NO: 386 - protein, 14 aa, Artificial Sequence
  Description of Artificial Sequence: Synthetic peptide
  N-term Acetic Acid
  MOD_RES (1)..(1): (R)-2-allylpyrrolidine-2-carboxylic acid
  MOD_RES (4)..(4): 2-amino-2-(pent-4-en-1-yl)hept-6-enoic acid
  MOD_RES (11)..(11): (S)-2-amino-2-methyldec-9-enoic acid
  MOD_RES (13)..(13): (S)-2-amino-3-(benzo[b]thiophen-3-yl)propanoic acid
  C-term amino
XFIXDEAADQXFXQ

SEQ ID NO: 387 - protein, 14 aa, Artificial Sequence
  Description of Artificial Sequence: Synthetic peptide
  N-term Acetic Acid
  MOD_RES (1)..(1): (R)-2-allylpyrrolidine-2-carboxylic acid
  MOD_RES (3)..(3): N6-(2-azidoacetyl)-L-lysine
  MOD_RES (4)..(4): 2-amino-2-(pent-4-en-1-yl)hept-6-enoic acid
  MOD_RES (11)..(11): (S)-2-amino-2-methyldec-9-enoic acid
  MOD_RES (13)..(13): (S)-2-amino-3-(benzo[b]thiophen-3-yl)propanoic acid
  C-term amino
XDKXDEAAFQXFXQ

SEQ ID NO: 388 - protein, 14 aa, Artificial Sequence
  Description of Artificial Sequence: Synthetic peptide
  N-term Acetic Acid
  MOD_RES (1)..(1): (R)-2-allylpyrrolidine-2-carboxylic acid
  MOD_RES (4)..(4): 2-amino-2-(pent-4-en-1-yl)hept-6-enoic acid
  MOD_RES (7)..(7): N6-(2-azidoacetyl)-L-lysine
  MOD_RES (11)..(11): (S)-2-amino-2-methyldec-9-enoic acid
  MOD_RES (13)..(13): (S)-2-amino-3-(benzo[b]thiophen-3-yl)propanoic acid
  C-term amino
XDIXDEKAFQXFXQ

SEQ ID NO: 389 - protein, 14 aa, Artificial Sequence
  Description of Artificial Sequence: Synthetic peptide
  N-term Acetic Acid
  MOD_RES (1)..(1): (R)-2-allylpyrrolidine-2-carboxylic acid
  MOD_RES (4)..(4): 2-amino-2-(pent-4-en-1-yl)hept-6-enoic acid
  MOD_RES (8)..(8): N6-(2-azidoacetyl)-L-lysine
  MOD_RES (11)..(11): (S)-2-amino-2-methyldec-9-enoic acid
  MOD_RES (13)..(13): (S)-2-amino-3-(benzo[b]thiophen-3-yl)propanoic acid
  C-term amino
XDIXDEAKFQXFXQ

SEQ ID NO: 390 - protein, 14 aa, Artificial Sequence
  Description of Artificial Sequence: Synthetic peptide
  N-term Acetic Acid
  MOD_RES (1)..(1): (R)-2-allylpyrrolidine-2-carboxylic acid
  MOD_RES (4)..(4): 2-amino-2-(pent-4-en-1-yl)hept-6-enoic acid
  MOD_RES (10)..(10): N6-(2-azidoacetyl)-L-lysine
  MOD_RES (11)..(11): (S)-2-amino-2-methyldec-9-enoic acid
  MOD_RES (13)..(13): (S)-2-amino-3-(benzo[b]thiophen-3-yl)propanoic acid
  C-term amino
XDIXDEAAFKXFXQ

SEQ ID NO: 391 - protein, 14 aa, Artificial Sequence
  Description of Artificial Sequence: Synthetic peptide
  N-term Acetic Acid
  MOD_RES (1)..(1): (R)-2-allylpyrrolidine-2-carboxylic acid
  MOD_RES (4)..(4): 2-amino-2-(pent-4-en-1-yl)hept-6-enoic acid
  MOD_RES (11)..(11): (S)-2-amino-2-methyldec-9-enoic acid
  MOD_RES (13)..(13): (S)-2-amino-3-(benzo[b]thiophen-3-yl)propanoic acid
  MOD_RES (14)..(14): N6-(2-azidoacetyl)-L-lysine
  C-term amino
XDIXDEAAFQXFXK

SEQ ID NO: 392 - protein, 15 aa, Artificial Sequence
  Description of Artificial Sequence: Synthetic peptide
  N-term Acetic Acid
  MOD_RES (1)..(1): (R)-2-allylpyrrolidine-2-carboxylic acid
  MOD_RES (4)..(4): 2-amino-2-(pent-4-en-1-yl)hept-6-enoic acid
  MOD_RES (11)..(11): (S)-2-amino-2-methyldec-9-enoic acid
  MOD_RES (13)..(13): (S)-2-amino-3-(benzo[b]thiophen-3-yl)propanoic acid
  MOD_RES (15)..(15): N6-(2-azidoacetyl)-L-lysine
  C-term amino
XDIXDEAAFQXFXQK

SEQ ID NO: 393 - protein, 14 aa, Artificial Sequence
  Description of Artificial Sequence: Synthetic peptide
  N-term Nicotinic acid
  MOD_RES (1)..(1): (R)-2-allylpyrrolidine-2-carboxylic acid
  MOD_RES (4)..(4): 2-amino-2-(pent-4-en-1-yl)hept-6-enoic acid
  MOD_RES (11)..(11): (S)-2-amino-2-methyldec-9-enoic acid
  MOD_RES (13)..(13): (S)-2-amino-3-(benzo[b]thiophen-3-yl)propanoic acid
  C-term amino
XDIXDEAAFQXFXQ

SEQ ID NO: 394 - protein, 14 aa, Artificial Sequence
  Description of Artificial Sequence: Synthetic peptide
  N-term picolinic acid
  MOD_RES (1)..(1): (R)-2-allylpyrrolidine-2-carboxylic acid
  MOD_RES (4)..(4): 2-amino-2-(pent-4-en-1-yl)hept-6-enoic acid
  MOD_RES (11)..(11): (S)-2-amino-2-methyldec-9-enoic acid
  MOD_RES (13)..(13): (S)-2-amino-3-(benzo[b]thiophen-3-yl)propanoic acid
  C-term amino
XDIXDEAAFQXFXQ

SEQ ID NO: 395 - protein, 14 aa, Artificial Sequence
  Description of Artificial Sequence: Synthetic peptide
  N-term 2-phenylacetic acid
  MOD_RES (1)..(1): (R)-2-allylpyrrolidine-2-carboxylic acid
  MOD_RES (4)..(4): 2-amino-2-(pent-4-en-1-yl)hept-6-enoic acid
  MOD_RES (11)..(11): (S)-2-amino-2-methyldec-9-enoic acid
  MOD_RES (13)..(13): (S)-2-amino-3-(benzo[b]thiophen-3-yl)propanoic acid
  C-term amino
XDIXDEAAFQXFXQ

SEQ ID NO: 396 - protein, 14 aa, Artificial Sequence
  Description of Artificial Sequence: Synthetic peptide
  N-term 3-(pyridin-2-yl)propanoic acid
  MOD_RES (1)..(1): (R)-2-allylpyrrolidine-2-carboxylic acid
  MOD_RES (4)..(4): 2-amino-2-(pent-4-en-1-yl)hept-6-enoic acid
  MOD_RES (11)..(11): (S)-2-amino-2-methyldec-9-enoic acid
  MOD_RES (13)..(13): (S)-2-amino-3-(benzo[b]thiophen-3-yl)propanoic acid
  C-term amino
XDIXDEAAFQXFXQ

SEQ ID NO: 397 - protein, 14 aa, Artificial Sequence
  Description of Artificial Sequence: Synthetic peptide
  N-term Acetic Acid
  MOD_RES (1)..(1): (R)-2-allylpyrrolidine-2-carboxylic acid
  MOD_RES (4)..(4): 2-amino-2-(pent-4-en-1-yl)hept-6-enoic acid
  MOD_RES (11)..(11): (S)-2-amino-2-methyldec-9-enoic acid
  MOD_RES (13)..(13): (S)-2-amino-3-(benzo[b]thiophen-3-yl)propanoic acid
  C-term amino
XDIXDQAAFQXFXQ

SEQ ID NO: 398 - protein, 14 aa, Artificial Sequence
  Description of Artificial Sequence: Synthetic peptide
  N-term Acetic Acid
  MOD_RES (1)..(1): (R)-2-allylpyrrolidine-2-carboxylic acid
  MOD_RES (4)..(4): 2-amino-2-(pent-4-en-1-yl)hept-6-enoic acid
  MOD_RES (6)..(6): (S)-2-amino-5-ureidopentanoic acid
  MOD_RES (11)..(11): (S)-2-amino-2-methyldec-9-enoic acid
  MOD_RES (13)..(13): (S)-2-amino-3-(benzo[b]thiophen-3-yl)propanoic acid
  C-term amino
XDIXDXAAFQXFXQ

SEQ ID NO: 399 - protein, 14 aa, Artificial Sequence
  Description of Artificial Sequence: Synthetic peptide
  N-term Acetic Acid
  MOD_RES (1)..(1): (R)-2-allylpyrrolidine-2-carboxylic acid
  MOD_RES (4)..(4): 2-amino-2-(pent-4-en-1-yl)hept-6-enoic acid
  MOD_RES (6)..(6): (S)-4-(2-amino-2-carboxyethyl)benzoic acid
  MOD_RES (11)..(11): (S)-2-amino-2-methyldec-9-enoic acid
  MOD_RES (13)..(13): (S)-2-amino-3-(benzo[b]thiophen-3-yl)propanoic acid
  C-term amino
XDIXDXAAFQXFXQ

SEQ ID NO: 400 - protein, 14 aa, Artificial Sequence
  Description of Artificial Sequence: Synthetic peptide
  N-term Acetic Acid
  MOD_RES (1)..(1): (R)-2-allylpyrrolidine-2-carboxylic acid
  MOD_RES (4)..(4): 2-amino-2-(pent-4-en-1-yl)hept-6-enoic acid
  MOD_RES (6)..(6): (S)-2-amino-3-((carboxymethyl)(ethyl)amino)propanoic acid
  MOD_RES (11)..(11): (S)-2-amino-2-methyldec-9-enoic acid
  MOD_RES (13)..(13): (S)-2-amino-3-(benzo[b]thiophen-3-yl)propanoic acid
  C-term amino
XDIXDXAAFQXFXQ

SEQ ID NO: 401 - protein, 14 aa, Artificial Sequence
  Description of Artificial Sequence: Synthetic peptide
  N-term Acetic Acid
  MOD_RES (1)..(1): (R)-2-allylpyrrolidine-2-carboxylic acid
  MOD_RES (4)..(4): 2-amino-2-(pent-4-en-1-yl)hept-6-enoic acid
  MOD_RES (6)..(6): (S)-2-amino-3-((carboxymethyl)(2,2,2-trifluoroethyl)amino) propanoic acid
  MOD_RES (11)..(11): (S)-2-amino-2-methyldec-9-enoic acid
  MOD_RES (13)..(13): (S)-2-amino-3-(benzo[b]thiophen-3-yl)propanoic acid
  C-term amino
XDIXDXAAFQXFXQ

SEQ ID NO: 402 - protein, 14 aa, Artificial Sequence
  Description of Artificial Sequence: Synthetic peptide
  N-term Acetic Acid
  MOD_RES (1)..(1): (R)-2-allylpyrrolidine-2-carboxylic acid
  MOD_RES (4)..(4): 2-amino-2-(pent-4-en-1-yl)hept-6-enoic acid
  MOD_RES (6)..(6): (S)-2-aminohexanedioic acid
  MOD_RES (11)..(11): (S)-2-amino-2-methyldec-9-enoic acid
  MOD_RES (13)..(13): (S)-2-amino-3-(benzo[b]thiophen-3-yl)propanoic acid
  C-term amino
XDIXDXAAFQXFXQ

SEQ ID NO: 403 - protein, 14 aa, Artificial Sequence
  Description of Artificial Sequence: Synthetic peptide
  N-term Acetic Acid
  MOD_RES (1)..(1): (R)-2-allylpyrrolidine-2-carboxylic acid
  MOD_RES (4)..(4): 2-amino-2-(pent-4-en-1-yl)hept-6-enoic acid
  MOD_RES (11)..(11): (S)-2-amino-2-methyldec-9-enoic acid
  MOD_RES (13)..(13): (S)-2-amino-3-(benzo[b]thiophen-3-yl)propanoic acid
  C-term amino
XDIXDRAAFQXFXQ

SEQ ID NO: 404 - protein, 14 aa, Artificial Sequence
  Description of Artificial Sequence: Synthetic peptide
  N-term Acetic Acid
  MOD_RES (1)..(1): (R)-2-allylpyrrolidine-2-carboxylic acid
  MOD_RES (3)..(3): (S)-2-amino-3-cyclohexylpropanoic acid
  MOD_RES (4)..(4): 2-amino-2-(pent-4-en-1-yl)hept-6-enoic acid
  MOD_RES (11)..(11): (S)-2-amino-2-methyldec-9-enoic acid
  MOD_RES (13)..(13): (S)-2-amino-3-(benzo[b]thiophen-3-yl)propanoic acid
  C-term amino
XDXXDEAAFNXFXH

SEQ ID NO: 405 - protein, 14 aa, Artificial Sequence
  Description of Artificial Sequence: Synthetic peptide
  N-term Acetic Acid
  MOD_RES (1)..(1): (R)-2-allylpyrrolidine-2-carboxylic acid
  MOD_RES (4)..(4): 2-amino-2-(pent-4-en-1-yl)hept-6-enoic acid
  MOD_RES (10)..(10): (S)-2-amino-5-ureidopentanoic acid
  MOD_RES (11)..(11): (S)-2-amino-2-methyldec-9-enoic acid
  MOD_RES (13)..(13): (S)-2-amino-3-(benzo[b]thiophen-3-yl)propanoic acid
  C-term amino
XDLXDEAAFXXFXH

SEQ ID NO: 406 - protein, 14 aa, Artificial Sequence
  Description of Artificial Sequence: Synthetic peptide
  N-term Acetic Acid
  MOD_RES (1)..(1): (R)-2-allylpyrrolidine-2-carboxylic acid
  MOD_RES (4)..(4): 2-amino-2-(pent-4-en-1-yl)hept-6-enoic acid
  MOD_RES (11)..(11): (S)-2-amino-2-methyldec-9-enoic acid
  MOD_RES (13)..(13): (S)-2-amino-3-(benzo[b]thiophen-3-yl)propanoic acid
  C-term amino
XDLXDEAAFTXFXH

SEQ ID NO: 407 - protein, 14 aa, Artificial Sequence
  Description of Artificial Sequence: Synthetic peptide
  N-term Acetic Acid
  MOD_RES (1)..(1): (R)-2-allylpyrrolidine-2-carboxylic acid
  MOD_RES (3)..(3): (S)-2-amino-3-cyclohexylpropanoic acid
  MOD_RES (4)..(4): 2-amino-2-(pent-4-en-1-yl)hept-6-enoic acid
  MOD_RES (11)..(11): (S)-2-amino-2-methyldec-9-enoic acid
  MOD_RES (13)..(13): (S)-2-amino-3-(benzo[b]thiophen-3-yl)propanoic acid
  C-term amino
XDXXDEAAFNXFXQ

SEQ ID NO: 408 - protein, 14 aa, Artificial Sequence
  Description of Artificial Sequence: Synthetic peptide
  N-term Acetic Acid
  MOD_RES (1)..(1): (R)-2-allylpyrrolidine-2-carboxylic acid
  MOD_RES (4)..(4): 2-amino-2-(pent-4-en-1-yl)hept-6-enoic acid
  MOD_RES (10)..(10): (S)-2-amino-5-ureidopentanoic acid
  MOD_RES (11)..(11): (S)-2-amino-2-methyldec-9-enoic acid
  MOD_RES (13)..(13): (S)-2-amino-3-(benzo[b]thiophen-3-yl)propanoic acid
  C-term amino
XDLXDEAAFXXFXQ

SEQ ID NO: 409 - protein, 14 aa, Artificial Sequence
  Description of Artificial Sequence: Synthetic peptide
  N-term Acetic Acid
  MOD_RES (1)..(1): (R)-2-allylpyrrolidine-2-carboxylic acid
  MOD_RES (4)..(4): 2-amino-2-(pent-4-en-1-yl)hept-6-enoic acid
  MOD_RES (11)..(11): (S)-2-amino-2-methyldec-9-enoic acid
  MOD_RES (13)..(13): (S)-2-amino-3-(benzo[b]thiophen-3-yl)propanoic acid
  C-term amino
XDLXDEAAFTXFXQ

SEQ ID NO: 410 - protein, 13 aa, Artificial Sequence
  Description of Artificial Sequence: Synthetic peptide
  N-term Acetic Acid
  MOD_RES (1)..(1): (R)-2-allylpyrrolidine-2-carboxylic acid
  MOD_RES (4)..(4): 2-amino-2-(pent-4-en-1-yl)hept-6-enoic acid
  MOD_RES (11)..(11): (S)-2-amino-2-methyldec-9-enoic acid
  MOD_RES (13)..(13): (S)-2-amino-3-(benzo[b]thiophen-3-yl)propanoic acid
  C-term amino
XDLXDEAAFNXFX

SEQ ID NO: 411 - protein, 13 aa, Artificial Sequence
  Description of Artificial Sequence: Synthetic peptide
  N-term Acetic Acid
  MOD_RES (1)..(1): (R)-2-allylpyrrolidine-2-carboxylic acid
  MOD_RES (3)..(3): (S)-2-amino-3-cyclohexylpropanoic acid
  MOD_RES (4)..(4): 2-amino-2-(pent-4-en-1-yl)hept-6-enoic acid
  MOD_RES (11)..(11): (S)-2-amino-2-methyldec-9-enoic acid
  MOD_RES (13)..(13): (S)-2-amino-3-(benzo[b]thiophen-3-yl)propanoic acid
  C-term amino
XDXXDEAAFNXFX

SEQ ID NO: 412 - protein, 13 aa, Artificial Sequence
  Description of Artificial Sequence: Synthetic peptide
  N-term Acetic Acid
  MOD_RES (1)..(1): (R)-2-allylpyrrolidine-2-carboxylic acid
  MOD_RES (4)..(4): 2-amino-2-(pent-4-en-1-yl)hept-6-enoic acid
  MOD_RES (10)..(10): (S)-2-amino-5-ureidopentanoic acid
  MOD_RES (11)..(11): (S)-2-amino-2-methyldec-9-enoic acid
  MOD_RES (13)..(13): (S)-2-amino-3-(benzo[b]thiophen-3-yl)propanoic acid
  C-term amino
XDLXDEAAFXXFX

SEQ ID NO: 413 - protein, 14 aa, Artificial Sequence
  Description of Artificial Sequence: Synthetic peptide
  N-term Acetic Acid
  MOD_RES (1)..(1): (R)-2-allylpyrrolidine-2-carboxylic acid
  MOD_RES (4)..(4): 2-amino-2-(pent-4-en-1-yl)hept-6-enoic acid
  MOD_RES (5)..(5): (S)-2-amino-3-((trifluoromethyl)sulfonamido)propanoic acid
  MOD_RES (11)..(11): (S)-2-amino-2-methyldec-9-enoic acid
  MOD_RES (13)..(13): (S)-2-amino-3-(benzo[b]thiophen-3-yl)propanoic acid
  C-term amino
XDIXXEAAFQXFXQ

SEQ ID NO: 414 - protein, 14 aa, Artificial Sequence
  Description of Artificial Sequence: Synthetic peptide
  N-term Acetic Acid
  MOD_RES (1)..(1): (R)-2-allylpyrrolidine-2-carboxylic acid
  MOD_RES (2)..(2): (S)-2-amino-3-((trifluoromethyl)sulfonamido)propanoic acid
  MOD_RES (4)..(4): 2-amino-2-(pent-4-en-1-yl)hept-6-enoic acid
  MOD_RES (11)..(11): (S)-2-amino-2-methyldec-9-enoic acid
  MOD_RES (13)..(13): (S)-2-amino-3-(benzo[b]thiophen-3-yl)propanoic acid
  C-term amino
XXIXDEAAFQXFXQ

SEQ ID NO: 415 - protein, 14 aa, Artificial Sequence
  Description of Artificial Sequence: Synthetic peptide
  N-term Acetic Acid
  MOD_RES (1)..(1): (R)-2-allylpyrrolidine-2-carboxylic acid
  MOD_RES (4)..(4): 2-amino-2-(pent-4-en-1-yl)hept-6-enoic acid
  MOD_RES (11)..(11): (S)-2-amino-2-methyldec-9-enoic acid
  MOD_RES (13)..(13): (S)-2-amino-3-(benzo[b]thiophen-3-yl)propanoic acid
  C-term amino
XDIXDEAAFQXFXR

SEQ ID NO: 416 - protein, 14 aa, Artificial Sequence
  Description of Artificial Sequence: Synthetic peptide
  N-term Acetic Acid
  MOD_RES (1)..(1): (R)-2-allylpyrrolidine-2-carboxylic acid
  MOD_RES (4)..(4): 2-amino-2-(pent-4-en-1-yl)hept-6-enoic acid
  MOD_RES (11)..(11): (S)-2-amino-2-methyldec-9-enoic acid
  MOD_RES (13)..(13): (S)-2-amino-3-(benzo[b]thiophen-3-yl)propanoic acid
  C-term amino
XDIXDEAAFQXFXL

SEQ ID NO: 417 - protein, 14 aa, Artificial Sequence
  Description of Artificial Sequence: Synthetic peptide
  N-term Acetic Acid
  MOD_RES (1)..(1): (R)-2-allylpyrrolidine-2-carboxylic acid
  MOD_RES (4)..(4): 2-amino-2-(pent-4-en-1-yl)hept-6-enoic acid
  MOD_RES (11)..(11): (S)-2-amino-2-methyldec-9-enoic acid
  MOD_RES (13)..(13): (S)-2-amino-3-(benzo[b]thiophen-3-yl)propanoic acid
  C-term amino
XDIXDEAAFQXFXF

SEQ ID NO: 418 - protein, 14 aa, Artificial Sequence
  Description of Artificial Sequence: Synthetic peptide
  N-term Acetic Acid
  MOD_RES (1)..(1): (R)-2-allylpyrrolidine-2-carboxylic acid
  MOD_RES (4)..(4): 2-amino-2-(pent-4-en-1-yl)hept-6-enoic acid
  MOD_RES (11)..(11): (S)-2-amino-2-methyldec-9-enoic acid
  MOD_RES (13)..(13): (S)-2-amino-3-(benzo[b]thiophen-3-yl)propanoic acid
  C-term amino
XDIXDEAAFQXFXY

SEQ ID NO: 419 - protein, 14 aa, Artificial Sequence
  Description of Artificial Sequence: Synthetic peptide
  N-term Acetic Acid
  MOD_RES (1)..(1): (R)-2-allylpyrrolidine-2-carboxylic acid
  MOD_RES (4)..(4): 2-amino-2-(pent-4-en-1-yl)hept-6-enoic acid
  MOD_RES (11)..(11): (S)-2-amino-2-methyldec-9-enoic acid
  MOD_RES (13)..(13): (S)-2-amino-3-(benzo[b]thiophen-3-yl)propanoic acid
  C-term amino
XDIXDEAAFQXFXP

SEQ ID NO: 420 - protein, 14 aa, Artificial Sequence
  Description of Artificial Sequence: Synthetic peptide
  N-term Acetic Acid
  MOD_RES (1)..(1): (R)-2-allylpyrrolidine-2-carboxylic acid
  MOD_RES (4)..(4): 2-amino-2-(pent-4-en-1-yl)hept-6-enoic acid
  MOD_RES (11)..(11): (S)-2-amino-2-methyldec-9-enoic acid
  MOD_RES (13)..(13): (S)-2-amino-3-(benzo[b]thiophen-3-yl)propanoic acid
  C-term amino
XDIXDEAAFQXFXS

SEQ ID NO: 421 - protein, 14 aa, Artificial Sequence
  Description of Artificial Sequence: Synthetic peptide
  N-term Acetic Acid
  MOD_RES (1)..(1): (R)-2-allylpyrrolidine-2-carboxylic acid
  MOD_RES (4)..(4): 2-amino-2-(pent-4-en-1-yl)hept-6-enoic acid
  MOD_RES (11)..(11): (S)-2-amino-2-methyldec-9-enoic acid
  MOD_RES (13)..(13): (S)-2-amino-3-(benzo[b]thiophen-3-yl)propanoic acid
  C-term amino
XDIXDEAAFQXFXT

SEQ ID NO: 422 - protein, 14 aa, Artificial Sequence
  Description of Artificial Sequence: Synthetic peptide
  N-term Acetic Acid
  MOD_RES (1)..(1): (R)-2-allylpyrrolidine-2-carboxylic acid
  MOD_RES (4)..(4): 2-amino-2-(pent-4-en-1-yl)hept-6-enoic acid
  MOD_RES (11)..(11): (S)-2-amino-2-methyldec-9-enoic acid
  MOD_RES (13)..(13): (S)-2-amino-3-(benzo[b]thiophen-3-yl)propanoic acid
  C-term amino
XDIXDEAAFQXFXW

SEQ ID NO: 423 - protein, 14 aa, Artificial Sequence
  Description of Artificial Sequence: Synthetic peptide
  N-term Acetic Acid
  MOD_RES (1)..(1): (R)-2-allylpyrrolidine-2-carboxylic acid
  MOD_RES (4)..(4): 2-amino-2-(pent-4-en-1-yl)hept-6-enoic acid
  MOD_RES (11)..(11): (S)-2-amino-2-methyldec-9-enoic acid
  MOD_RES (13)..(13): (S)-2-amino-3-(benzo[b]thiophen-3-yl)propanoic acid
  C-term amino
XDIXDEAAFQXFXV

SEQ ID NO: 424 - protein, 14 aa, Artificial Sequence
  Description of Artificial Sequence: Synthetic peptide
  N-term Acetic Acid
  MOD_RES (1)..(1): (R)-2-allylpyrrolidine-2-carboxylic acid
  MOD_RES (4)..(4): 2-amino-2-(pent-4-en-1-yl)hept-6-enoic acid
  MOD_RES (11)..(11): (S)-2-amino-2-methyldec-9-enoic acid
  MOD_RES (13)..(13): (S)-2-amino-3-(benzo[b]thiophen-3-yl)propanoic acid
  C-term amino
XDIXDELAFQXFXQ

SEQ ID NO: 425 - protein, 14 aa, Artificial Sequence
  Description of Artificial Sequence: Synthetic peptide
  N-term Acetic Acid
  MOD_RES (1)..(1): (R)-2-allylpyrrolidine-2-carboxylic acid
  MOD_RES (4)..(4): 2-amino-2-(pent-4-en-1-yl)hept-6-enoic acid
  MOD_RES (11)..(11): (S)-2-amino-2-methyldec-9-enoic acid
  MOD_RES (13)..(13): (S)-2-amino-3-(benzo[b]thiophen-3-yl)propanoic acid
  C-term amino
XDIXDEFAFQXFXQ

SEQ ID NO: 426 - protein, 14 aa, Artificial Sequence
  Description of Artificial Sequence: Synthetic peptide
  N-term Acetic Acid
  MOD_RES (1)..(1): (R)-2-allylpyrrolidine-2-carboxylic acid
  MOD_RES (4)..(4): 2-amino-2-(pent-4-en-1-yl)hept-6-enoic acid
  MOD_RES (11)..(11): (S)-2-amino-2-methyldec-9-enoic acid
  MOD_RES (13)..(13): (S)-2-amino-3-(benzo[b]thiophen-3-yl)propanoic acid
  C-term amino
XDIXDESAFQXFXQ

SEQ ID NO: 427 - protein, 14 aa, Artificial Sequence
  Description of Artificial Sequence: Synthetic peptide
  N-term Acetic Acid
  MOD_RES (1)..(1): (R)-2-allylpyrrolidine-2-carboxylic acid
  MOD_RES (4)..(4): 2-amino-2-(pent-4-en-1-yl)hept-6-enoic acid
  MOD_RES (11)..(11): (S)-2-amino-2-methyldec-9-enoic acid
  MOD_RES (13)..(13): (S)-2-amino-3-(benzo[b]thiophen-3-yl)propanoic acid
  C-term amino
XDIXDEQAFQXFXQ

SEQ ID NO: 428 - protein, 14 aa, Artificial Sequence
  Description of Artificial Sequence: Synthetic peptide
  N-term Acetic Acid
  MOD_RES (1)..(1): (R)-2-allylpyrrolidine-2-carboxylic acid
  MOD_RES (4)..(4): 2-amino-2-(pent-4-en-1-yl)hept-6-enoic acid
  MOD_RES (11)..(11): (S)-2-amino-2-methyldec-9-enoic acid
  MOD_RES (13)..(13): (S)-2-amino-3-(benzo[b]thiophen-3-yl)propanoic acid
  C-term amino
XDIXDEWAFQXFXQ

SEQ ID NO: 429 - protein, 14 aa, Artificial Sequence
  Description of Artificial Sequence: Synthetic peptide
  N-term Acetic Acid
  MOD_RES (1)..(1): (R)-2-allylpyrrolidine-2-carboxylic acid
  MOD_RES (4)..(4): 2-amino-2-(pent-4-en-1-yl)hept-6-enoic acid
  MOD_RES (7)..(7): (S)-2-aminohexanoic acid
  MOD_RES (11)..(11): (S)-2-amino-2-methyldec-9-enoic acid
  MOD_RES (13)..(13): (S)-2-amino-3-(benzo[b]thiophen-3-yl)propanoic acid
  C-term amino
XDIXDEXAFQXFXQ

SEQ ID NO: 430 - protein, 14 aa, Artificial Sequence
  Description of Artificial Sequence: Synthetic peptide
  N-term Acetic Acid
  MOD_RES (1)..(1): (R)-2-allylpyrrolidine-2-carboxylic acid
  MOD_RES (4)..(4): 2-amino-2-(pent-4-en-1-yl)hept-6-enoic acid
  MOD_RES (11)..(11): (S)-2-amino-2-methyldec-9-enoic acid
  MOD_RES (13)..(13): (S)-2-amino-3-(benzo[b]thiophen-3-yl)propanoic acid
  C-term amino
XDIXDEALFQXFXQ

SEQ ID NO: 431 - protein, 14 aa, Artificial Sequence
  Description of Artificial Sequence: Synthetic peptide
  N-term Acetic Acid
  MOD_RES (1)..(1): (R)-2-allylpyrrolidine-2-carboxylic acid
  MOD_RES (4)..(4): 2-amino-2-(pent-4-en-1-yl)hept-6-enoic acid
  MOD_RES (11)..(11): (S)-2-amino-2-methyldec-9-enoic acid
  MOD_RES (13)..(13): (S)-2-amino-3-(benzo[b]thiophen-3-yl)propanoic acid
  C-term amino
XDIXDEAFFQXFXQ

SEQ ID NO: 432 - protein, 14 aa, Artificial Sequence
  Description of Artificial Sequence: Synthetic peptide
  N-term Acetic Acid
  MOD_RES (1)..(1): (R)-2-allylpyrrolidine-2-carboxylic acid
  MOD_RES (4)..(4): 2-amino-2-(pent-4-en-1-yl)hept-6-enoic acid
  MOD_RES (11)..(11): (S)-2-amino-2-methyldec-9-enoic acid
  MOD_RES (13)..(13): (S)-2-amino-3-(benzo[b]thiophen-3-yl)propanoic acid
  C-term amino
XDIXDEASFQXFXQ

SEQ ID NO: 433 - protein, 14 aa, Artificial Sequence
  Description of Artificial Sequence: Synthetic peptide
  N-term Acetic Acid
  MOD_RES (1)..(1): (R)-2-allylpyrrolidine-2-carboxylic acid
  MOD_RES (4)..(4): 2-amino-2-(pent-4-en-1-yl)hept-6-enoic acid
  MOD_RES (11)..(11): (S)-2-amino-2-methyldec-9-enoic acid
  MOD_RES (13)..(13): (S)-2-amino-3-(benzo[b]thiophen-3-yl)propanoic acid
  C-term amino
XDIXDEAQFQXFXQ

SEQ ID NO: 434 - protein, 14 aa, Artificial Sequence
  Description of Artificial Sequence: Synthetic peptide
  N-term Acetic Acid
  MOD_RES (1)..(1): (R)-2-allylpyrrolidine-2-carboxylic acid
  MOD_RES (4)..(4): 2-amino-2-(pent-4-en-1-yl)hept-6-enoic acid
  MOD_RES (11)..(11): (S)-2-amino-2-methyldec-9-enoic acid
  MOD_RES (13)..(13): (S)-2-amino-3-(benzo[b]thiophen-3-yl)propanoic acid
  C-term amino
XDIXDEAWFQXFXQ

SEQ ID NO: 435 - protein, 14 aa, Artificial Sequence
  Description of Artificial Sequence: Synthetic peptide
  N-term Acetic Acid
  MOD_RES (1)..(1): (R)-2-allylpyrrolidine-2-carboxylic acid
  MOD_RES (4)..(4): 2-amino-2-(pent-4-en-1-yl)hept-6-enoic acid
  MOD_RES (8)..(8): (S)-2-aminohexanoic acid
  MOD_RES (11)..(11): (S)-2-amino-2-methyldec-9-enoic acid
  MOD_RES (13)..(13): (S)-2-amino-3-(benzo[b]thiophen-3-yl)propanoic acid
  C-term amino
XDIXDEAXFQXFXQ

SEQ ID NO: 436 - protein, 14 aa, Artificial Sequence
  Description of Artificial Sequence: Synthetic peptide
  N-term Acetic Acid
  MOD_RES (1)..(1): (R)-2-allylpyrrolidine-2-carboxylic acid
  MOD_RES (2)..(2): D-isoaspartic acid
  MOD_RES (4)..(4): 2-amino-2-(pent-4-en-1-yl)hept-6-enoic acid
  MOD_RES (11)..(11): (S)-2-amino-2-methyldec-9-enoic acid
  MOD_RES (13)..(13): (S)-2-amino-3-(benzo[b]thiophen-3-yl)propanoic acid
  C-term amino
XDIXDEAAFQXFXQ

SEQ ID NO: 437 - protein, 14 aa, Artificial Sequence
  Description of Artificial Sequence: Synthetic peptide
  N-term Acetic Acid
  MOD_RES (1)..(1): (R)-2-allylpyrrolidine-2-carboxylic acid
  MOD_RES (2)..(2): 3-aminopentanedioic acid
  MOD_RES (4)..(4): 2-amino-2-(pent-4-en-1-yl)hept-6-enoic acid
  MOD_RES (11)..(11): (S)-2-amino-2-methyldec-9-enoic acid
  MOD_RES (13)..(13): (S)-2-amino-3-(benzo[b]thiophen-3-yl)propanoic acid
  C-term amino
XXIXDEAAFQXFXQ

SEQ ID NO: 438 - protein, 14 aa, Artificial Sequence
  Description of Artificial Sequence: Synthetic peptide
  N-term Acetic Acid
  MOD_RES (1)..(1): (R)-2-allylpyrrolidine-2-carboxylic acid
  MOD_RES (2)..(2): 3-aminopentanedioic acid
  MOD_RES (4)..(4): 2-amino-2-(pent-4-en-1-yl)hept-6-enoic acid
  MOD_RES (11)..(11): (S)-2-amino-2-methyldec-9-enoic acid
  MOD_RES (13)..(13): (S)-2-amino-3-(benzo[b]thiophen-3-yl)propanoic acid
  C-term amino
XXIXDEAAFQXFXQ

SEQ ID NO: 439 - protein, 14 aa, Artificial Sequence
  Description of Artificial Sequence: Synthetic peptide
  N-term Acetic Acid
  MOD_RES (1)..(1): (R)-2-allylpyrrolidine-2-carboxylic acid
  MOD_RES (4)..(4): 2-amino-2-(pent-4-en-1-yl)hept-6-enoic acid
  MOD_RES (5)..(5): L-isoaspartic acid
  MOD_RES (11)..(11): (S)-2-amino-2-methyldec-9-enoic acid
  MOD_RES (13)..(13): (S)-2-amino-3-(benzo[b]thiophen-3-yl)propanoic acid
  C-term amino
XDIXDEAAFQXFXQ

SEQ ID NO: 440 - protein, 14 aa, Artificial Sequence
  Description of Artificial Sequence: Synthetic peptide
  N-term Acetic Acid
  MOD_RES (1)..(1): (R)-2-allylpyrrolidine-2-carboxylic acid
  MOD_RES (4)..(4): 2-amino-2-(pent-4-en-1-yl)hept-6-enoic acid
  MOD_RES (5)..(5): D-isoaspartic acid
  MOD_RES (11)..(11): (S)-2-amino-2-methyldec-9-enoic acid
  MOD_RES (13)..(13): (S)-2-amino-3-(benzo[b]thiophen-3-yl)propanoic acid
  C-term amino
XDIXDEAAFQXFXQ

SEQ ID NO: 441 - protein, 14 aa, Artificial Sequence
  Description of Artificial Sequence: Synthetic peptide
  N-term Acetic Acid
  MOD_RES (1)..(1): (R)-2-allylpyrrolidine-2-carboxylic acid
  MOD_RES (4)..(4): 2-amino-2-(pent-4-en-1-yl)hept-6-enoic acid
  MOD_RES (5)..(5): 3-aminopentanedioic acid
  MOD_RES (11)..(11): (S)-2-amino-2-methyldec-9-enoic acid
  MOD_RES (13)..(13): (S)-2-amino-3-(benzo[b]thiophen-3-yl)propanoic acid
  C-term amino
XDIXXEAAFQXFXQ

SEQ ID NO: 442 - protein, 14 aa, Artificial Sequence
  Description of Artificial Sequence: Synthetic peptide
  N-term Acetic Acid
  MOD_RES (1)..(1): (R)-2-allylpyrrolidine-2-carboxylic acid
  MOD_RES (4)..(4): 2-amino-2-(pent-4-en-1-yl)hept-6-enoic acid
  MOD_RES (5)..(5): 3-aminopentanedioic acid
  MOD_RES (11)..(11): (S)-2-amino-2-methyldec-9-enoic acid
  MOD_RES (13)..(13): (S)-2-amino-3-(benzo[b]thiophen-3-yl)propanoic acid
  C-term amino
XDIXXEAAFQXFXQ

SEQ ID NO: 443 - protein, 14 aa, Artificial Sequence
  Description of Artificial Sequence: Synthetic peptide
  N-term Acetic Acid
  MOD_RES (1)..(1): (R)-2-allylpyrrolidine-2-carboxylic acid
  MOD_RES (3)..(3): (S)-2-amino-4,4-dimethylpentanoic acid
  MOD_RES (4)..(4): 2-amino-2-(pent-4-en-1-yl)hept-6-enoic acid
  MOD_RES (11)..(11): (S)-2-amino-2-methyldec-9-enoic acid
  MOD_RES (13)..(13): (S)-2-amino-3-(benzo[b]thiophen-3-yl)propanoic acid
  C-term amino
XDXXDEAAFNXFXQ

SEQ ID NO: 444 - protein, 14 aa, Artificial Sequence
  Description of Artificial Sequence: Synthetic peptide
  N-term Acetic Acid
  MOD_RES (1)..(1): (R)-2-allylpyrrolidine-2-carboxylic acid
  MOD_RES (3)..(3): (S)-2-amino-4,4-dimethylpentanoic acid
  MOD_RES (4)..(4): 2-amino-2-(pent-4-en-1-yl)hept-6-enoic acid
  MOD_RES (11)..(11): (S)-2-amino-2-methyldec-9-enoic acid
  MOD_RES (12)..(12): (S)-2-amino-3-(thiophen-3-yl)propanoic acid
  MOD_RES (13)..(13): (S)-2-amino-3-(benzo[b]thiophen-3-yl)propanoic acid
  C-term amino
XDXXDDAAFNXXXQ

SEQ ID NO: 445 - protein, 14 aa, Artificial Sequence
  Description of Artificial Sequence: Synthetic peptide
  N-term Acetic Acid
  MOD_RES (1)..(1): (R)-2-allylpyrrolidine-2-carboxylic acid
  MOD_RES (4)..(4): 2-amino-2-(pent-4-en-1-yl)hept-6-enoic acid
  MOD_RES (11)..(11): (S)-2-amino-2-methyldec-9-enoic acid
  MOD_RES (12)..(12): (S)-2-amino-3-(thiophen-3-yl)propanoic acid
  MOD_RES (13)..(13): (S)-2-amino-3-(benzo[b]thiophen-3-yl)propanoic acid
  C-term amino
XDLXDDAAFNXXXQ

SEQ ID NO: 446 - protein, 14 aa, Artificial Sequence
  Description of Artificial Sequence: Synthetic peptide
  N-term Acetic Acid
  MOD_RES (1)..(1): (R)-2-allylpyrrolidine-2-carboxylic acid
  MOD_RES (3)..(3): (S)-2-amino-4,4-dimethylpentanoic acid
  MOD_RES (4)..(4): 2-amino-2-(pent-4-en-1-yl)hept-6-enoic acid
  MOD_RES (11)..(11): (S)-2-amino-2-methyldec-9-enoic acid
  MOD_RES (12)..(12): (S)-2-amino-3-(thiophen-3-yl)propanoic acid
  MOD_RES (13)..(13): (S)-2-amino-3-(benzo[b]thiophen-3-yl)propanoic acid
  C-term amino
XDXXDEAAFNXXXQ

SEQ ID NO: 447 - protein, 14 aa, Artificial Sequence
  Description of Artificial Sequence: Synthetic peptide
  N-term Acetic Acid
  MOD_RES (1)..(1): (R)-2-allylpyrrolidine-2-carboxylic acid
  MOD_RES (3)..(3): (S)-2-amino-4,4-dimethylpentanoic acid
  MOD_RES (4)..(4): 2-amino-2-(pent-4-en-1-yl)hept-6-enoic acid
  MOD_RES (11)..(11): (S)-3-amino-1-((pent-4-en-1-yloxy)carbonyl)pyrrolidine-3- carboxylic acid
  MOD_RES (13)..(13): (S)-2-amino-3-(benzo[b]thiophen-3-yl)propanoic acid
  C-term amino
XDXXDEAAFNXFXQ

SEQ ID NO: 448 - protein, 14 aa, Artificial Sequence
  Description of Artificial Sequence: Synthetic peptide
  N-term Acetic Acid
  MOD_RES (1)..(1): (R)-2-allylpyrrolidine-2-carboxylic acid
  MOD_RES (3)..(3): (S)-2-amino-4,4-dimethylpentanoic acid
  MOD_RES (4)..(4): 2-amino-2-(pent-4-en-1-yl)hept-6-enoic acid
  MOD_RES (11)..(11): (S)-3-amino-1-((pent-4-en-1-yloxy)carbonyl)pyrrolidine-3- carboxylic acid
  MOD_RES (12)..(12): (S)-2-amino-3-(thiophen-3-yl)propanoic acid
  MOD_RES (13)..(13): (S)-2-amino-3-(benzo[b]thiophen-3-yl)propanoic acid
  C-term amino
XDXXDDAAFNXXXQ

SEQ ID NO: 449 - protein, 14 aa, Artificial Sequence
  Description of Artificial Sequence: Synthetic peptide
  N-term Acetic Acid
  MOD_RES (1)..(1): (R)-2-allylpyrrolidine-2-carboxylic acid
  MOD_RES (4)..(4): 2-amino-2-(pent-4-en-1-yl)hept-6-enoic acid
  MOD_RES (11)..(11): (S)-3-amino-1-((pent-4-en-1-yloxy)carbonyl)pyrrolidine-3- carboxylic acid
  MOD_RES (12)..(12): (S)-2-amino-3-(thiophen-3-yl)propanoic acid
  MOD_RES (13)..(13): (S)-2-amino-3-(benzo[b]thiophen-3-yl)propanoic acid
  C-term amino
XDLXDDAAFNXXXQ

SEQ ID NO: 450 - protein, 14 aa, Artificial Sequence
  Description of Artificial Sequence: Synthetic peptide
  N-term Acetic Acid
  MOD_RES (1)..(1): (R)-2-allylpyrrolidine-2-carboxylic acid
  MOD_RES (3)..(3): (S)-2-amino-4,4-dimethylpentanoic acid
  MOD_RES (4)..(4): 2-amino-2-(pent-4-en-1-yl)hept-6-enoic acid
  MOD_RES (11)..(11): (S)-3-amino-1-((pent-4-en-1-yloxy)carbonyl)pyrrolidine-3- carboxylic acid
  MOD_RES (12)..(12): (S)-2-amino-3-(thiophen-3-yl)propanoic acid
  MOD_RES (13)..(13): (S)-2-amino-3-(benzo[b]thiophen-3-yl)propanoic acid
  C-term amino
XDXXDEAAFNXXXQ

SEQ ID NO: 451 - protein, 14 aa, Artificial Sequence
  Description of Artificial Sequence: Synthetic peptide
  N-term Acetic Acid
  MOD_RES (1)..(1): (R)-2-allylpyrrolidine-2-carboxylic acid
  MOD_RES (3)..(3): (S)-2-amino-4,4-dimethylpentanoic acid
  MOD_RES (4)..(4): 2-amino-2-(pent-4-en-1-yl)hept-6-enoic acid
  MOD_RES (11)..(11): (S)-3-amino-1-((pent-4-en-1-yloxy)carbonyl)pyrrolidine-3- carboxylic acid
  MOD_RES (13)..(13): (S)-2-amino-3-(benzo[b]thiophen-3-yl)propanoic acid
  C-term amino
XDXXDEAAFNXFXH

SEQ ID NO: 452 - protein, 14 aa, Artificial Sequence
  Description of Artificial Sequence: Synthetic peptide
  N-term Acetic Acid
  MOD_RES (1)..(1): (R)-2-allylpyrrolidine-2-carboxylic acid
  MOD_RES (3)..(3): (S)-2-amino-4,4-dimethylpentanoic acid
  MOD_RES (4)..(4): 2-amino-2-(pent-4-en-1-yl)hept-6-enoic acid
  MOD_RES (11)..(11): (S)-3-amino-1-((pent-4-en-1-yloxy)carbonyl)pyrrolidine-3- carboxylic acid
  MOD_RES (12)..(12): (S)-2-amino-3-(thiophen-3-yl)propanoic acid
  MOD_RES (13)..(13): (S)-2-amino-3-(benzo[b]thiophen-3-yl)propanoic acid
  C-term amino
XDXXDDAAFNXXXH

SEQ ID NO: 453 - protein, 14 aa, Artificial Sequence
  Description of Artificial Sequence: Synthetic peptide
  N-term Acetic Acid
  MOD_RES (1)..(1): (R)-2-allylpyrrolidine-2-carboxylic acid
  MOD_RES (4)..(4): 2-amino-2-(pent-4-en-1-yl)hept-6-enoic acid
  MOD_RES (11)..(11): (S)-3-amino-1-((pent-4-en-1-yloxy)carbonyl)pyrrolidine-3- carboxylic acid
  MOD_RES (12)..(12): (S)-2-amino-3-(thiophen-3-yl)propanoic acid
  MOD_RES (13)..(13): (S)-2-amino-3-(benzo[b]thiophen-3-yl)propanoic acid
  C-term amino
XDLXDDAAFNXXXH

SEQ ID NO: 454 - protein, 14 aa, Artificial Sequence
  Description of Artificial Sequence: Synthetic peptide
  N-term Acetic Acid
  MOD_RES (1)..(1): (R)-2-allylpyrrolidine-2-carboxylic acid
  MOD_RES (3)..(3): (S)-2-amino-4,4-dimethylpentanoic acid
  MOD_RES (4)..(4): 2-amino-2-(pent-4-en-1-yl)hept-6-enoic acid
  MOD_RES (11)..(11): (S)-3-amino-1-((pent-4-en-1-yloxy)carbonyl)pyrrolidine-3- carboxylic acid
  MOD_RES (12)..(12): (S)-2-amino-3-(thiophen-3-yl)propanoic acid
  MOD_RES (13)..(13): (S)-2-amino-3-(benzo[b]thiophen-3-yl)propanoic acid
  C-term amino
XDXXDEAAFNXXXH

SEQ ID NO: 455 - protein, 14 aa, Artificial Sequence
  Description of Artificial Sequence: Synthetic peptide
  N-term Acetic Acid
  MOD_RES (1)..(1): (R)-2-allylpyrrolidine-2-carboxylic acid
  MOD_RES (4)..(4): 2-amino-2-(pent-4-en-1-yl)hept-6-enoic acid
  MOD_RES (6)..(6): (S)-2-amino-3-((carboxymethyl)(2,2,2-trifluoroethyl)amino) propanoic acid
  MOD_RES (11)..(11): (S)-2-amino-2-methyldec-9-enoic acid
  MOD_RES (13)..(13): (S)-2-amino-3-(benzo[b]thiophen-3-yl)propanoic acid
  C-term amino
XDIXDXAAFNXFXQ

SEQ ID NO: 456 - protein, 14 aa, Artificial Sequence
  Description of Artificial Sequence: Synthetic peptide
  N-term Acetic Acid
  MOD_RES (1)..(1): (R)-2-allylpyrrolidine-2-carboxylic acid
  MOD_RES (4)..(4): 2-amino-2-(pent-4-en-1-yl)hept-6-enoic acid
  MOD_RES (6)..(6): (S)-2-amino-3-((carboxymethyl)(2,2,2-trifluoroethyl)amino) propanoic acid
  MOD_RES (11)..(11): (S)-2-amino-2-methyldec-9-enoic acid
  MOD_RES (12)..(12): (S)-2-amino-3-(thiophen-3-yl)propanoic acid
  MOD_RES (13)..(13): (S)-2-amino-3-(benzo[b]thiophen-3-yl)propanoic acid
  C-term amino
XDIXDXAAFNXXXQ

SEQ ID NO: 457 - protein, 14 aa, Artificial Sequence
  Description of Artificial Sequence: Synthetic peptide
  N-term Acetic Acid
  MOD_RES (1)..(1): (R)-2-allylpyrrolidine-2-carboxylic acid
  MOD_RES (4)..(4): 2-amino-2-(pent-4-en-1-yl)hept-6-enoic acid
  MOD_RES (6)..(6): (S)-2-amino-3-((carboxymethyl)(2,2,2-trifluoroethyl)amino) propanoic acid
  MOD_RES (11)..(11): (S)-2-amino-2-methyldec-9-enoic acid
  MOD_RES (12)..(12): (S)-2-amino-3-(thiophen-3-yl)propanoic acid
  MOD_RES (13)..(13): (S)-2-amino-3-(benzo[b]thiophen-3-yl)propanoic acid
  C-term amino
XDIXDXAAFNXXXH

SEQ ID NO: 458 - protein, 14 aa, Artificial Sequence
  Description of Artificial Sequence: Synthetic peptide
  N-term Acetic Acid
  MOD_RES (1)..(1): (R)-2-allylpyrrolidine-2-carboxylic acid
  MOD_RES (3)..(3): (S)-2-amino-4,4-dimethylpentanoic acid
  MOD_RES (4)..(4): 2-amino-2-(pent-4-en-1-yl)hept-6-enoic acid
  MOD_RES (6)..(6): (S)-2-amino-3-((carboxymethyl)(2,2,2-trifluoroethyl)amino) propanoic acid
  MOD_RES (11)..(11): (S)-2-amino-2-methyldec-9-enoic acid
  MOD_RES (13)..(13): (S)-2-amino-3-(benzo[b]thiophen-3-yl)propanoic acid
  C-term amino
XDXXDXAAFNXFXQ

SEQ ID NO: 459 - protein, 14 aa, Artificial Sequence
  Description of Artificial Sequence: Synthetic peptide
  N-term Acetic Acid
  MOD_RES (1)..(1): (R)-2-allylpyrrolidine-2-carboxylic acid
  MOD_RES (3)..(3): (S)-2-amino-4,4-dimethylpentanoic acid
  MOD_RES (4)..(4): 2-amino-2-(pent-4-en-1-yl)hept-6-enoic acid
  MOD_RES (6)..(6): (S)-2-amino-3-((carboxymethyl)(2,2,2-trifluoroethyl)amino) propanoic acid
  MOD_RES (11)..(11): (S)-2-amino-2-methyldec-9-enoic acid
  MOD_RES (12)..(12): (S)-2-amino-3-(thiophen-3-yl)propanoic acid
  MOD_RES (13)..(13): (S)-2-amino-3-(benzo[b]thiophen-3-yl)propanoic acid
  C-term amino
XDXXDXAAFNXXXQ

SEQ ID NO: 460 - protein, 14 aa, Artificial Sequence
  Description of Artificial Sequence: Synthetic peptide
  N-term Acetic Acid
  MOD_RES (1)..(1): (R)-2-allylpyrrolidine-2-carboxylic acid
  MOD_RES (3)..(3): (S)-2-amino-4,4-dimethylpentanoic acid
  MOD_RES (4)..(4): 2-amino-2-(pent-4-en-1-yl)hept-6-enoic acid
  MOD_RES (6)..(6): (S)-2-amino-3-((carboxymethyl)(2,2,2-trifluoroethyl)amino) propanoic acid
  MOD_RES (11)..(11): (S)-2-amino-2-methyldec-9-enoic acid
  MOD_RES (12)..(12): (S)-2-amino-3-(thiophen-3-yl)propanoic acid
  MOD_RES (13)..(13): (S)-2-amino-3-(benzo[b]thiophen-3-yl)propanoic acid
  C-term amino
XDXXDXAAFNXXXH

SEQ ID NO: 461 - protein, 14 aa, Artificial Sequence
  Description of Artificial Sequence: Synthetic peptide
  N-term Acetic Acid
  MOD_RES (1)..(1): (R)-2-allylpyrrolidine-2-carboxylic acid
  MOD_RES (3)..(3): (S)-2-amino-3-cyclohexylpropanoic acid
  MOD_RES (4)..(4): 2-amino-2-(pent-4-en-1-yl)hept-6-enoic acid
  MOD_RES (6)..(6): (S)-2-amino-3-((carboxymethyl)(2,2,2-trifluoroethyl)amino) propanoic acid
  MOD_RES (11)..(11): (S)-2-amino-2-methyldec-9-enoic acid
  MOD_RES (13)..(13): (S)-2-amino-3-(benzo[b]thiophen-3-yl)propanoic acid
  C-term amino
XDXXDXAAFNXFXQ

SEQ ID NO: 462 - protein, 14 aa, Artificial Sequence
  Description of Artificial Sequence: Synthetic peptide
  N-term Acetic Acid
  MOD_RES (1)..(1): (R)-2-allylpyrrolidine-2-carboxylic acid
  MOD_RES (3)..(3): (S)-2-amino-3-cyclohexylpropanoic acid
  MOD_RES (4)..(4): 2-amino-2-(pent-4-en-1-yl)hept-6-enoic acid
  MOD_RES (6)..(6): (S)-2-amino-3-((carboxymethyl)(2,2,2-trifluoroethyl)amino) propanoic acid
  MOD_RES (11)..(11): (S)-2-amino-2-methyldec-9-enoic acid
  MOD_RES (12)..(12): (S)-2-amino-3-(thiophen-3-yl)propanoic acid
  MOD_RES (13)..(13): (S)-2-amino-3-(benzo[b]thiophen-3-yl)propanoic acid
  C-term amino
XDXXDXAAFNXXXQ

SEQ ID NO: 463 - protein, 14 aa, Artificial Sequence
  Description of Artificial Sequence: Synthetic peptide
  N-term Acetic Acid
  MOD_RES (1)..(1): (R)-2-allylpyrrolidine-2-carboxylic acid
  MOD_RES (3)..(3): (S)-2-amino-3-cyclohexylpropanoic acid
  MOD_RES (4)..(4): 2-amino-2-(pent-4-en-1-yl)hept-6-enoic acid
  MOD_RES (6)..(6): (S)-2-amino-3-((carboxymethyl)(2,2,2-trifluoroethyl)amino) propanoic acid
  MOD_RES (11)..(11): (S)-2-amino-2-methyldec-9-enoic acid
  MOD_RES (12)..(12): (S)-2-amino-3-(thiophen-3-yl)propanoic acid
  MOD_RES (13)..(13): (S)-2-amino-3-(benzo[b]thiophen-3-yl)propanoic acid
  C-term amino
XDXXDXAAFNXXXH

SEQ ID NO: 464 - protein, 14 aa, Artificial Sequence
  Description of Artificial Sequence: Synthetic peptide
  N-term methanesulfonic acid
  MOD_RES (1)..(1): (R)-2-allylpyrrolidine-2-carboxylic acid
  MOD_RES (4)..(4): 2-amino-2-(pent-4-en-1-yl)hept-6-enoic acid
  MOD_RES (11)..(11): (S)-2-amino-2-methyldec-9-enoic acid
  MOD_RES (13)..(13): (S)-2-amino-3-(benzo[b]thiophen-3-yl)propanoic acid
  C-term amino
XDIXDEAAFQXFXQ

SEQ ID NO: 465 - protein, 13 aa, Artificial Sequence
  Description of Artificial Sequence: Synthetic peptide
  N-term Acetic Acid
  MOD_RES (1)..(1): (R)-2-allylpyrrolidine-2-carboxylic acid
  MOD_RES (3)..(3): (S)-2-amino-4,4-dimethylpentanoic acid
  MOD_RES (4)..(4): 2-amino-2-(pent-4-en-1-yl)hept-6-enoic acid
  MOD_RES (11)..(11): (S)-2-amino-2-methyldec-9-enoic acid
  MOD_RES (13)..(13): (S)-2-amino-3-(benzo[b]thiophen-3-yl)propanoic acid
  C-term amino
XDXXDEAAFNXFX

SEQ ID NO: 466 - protein, 13 aa, Artificial Sequence
  Description of Artificial Sequence: Synthetic peptide
  N-term Acetic Acid
  MOD_RES (1)..(1): (R)-2-allylpyrrolidine-2-carboxylic acid
  MOD_RES (4)..(4): 2-amino-2-(pent-4-en-1-yl)hept-6-enoic acid
  MOD_RES (11)..(11): (S)-2-amino-2-methyldec-9-enoic acid
  MOD_RES (13)..(13): (S)-2-amino-3-(benzo[b]thiophen-3-yl)propanoic acid
  C-term amino
XDIXDEAAFNXFX

SEQ ID NO: 467 - protein, 13 aa, Artificial Sequence
  Description of Artificial Sequence: Synthetic peptide
  N-term Acetic Acid
  MOD_RES (1)..(1): (R)-2-allylpyrrolidine-2-carboxylic acid
  MOD_RES (4)..(4): 2-amino-2-(pent-4-en-1-yl)hept-6-enoic acid
  MOD_RES (11)..(11): (S)-2-amino-2-methyldec-9-enoic acid
  MOD_RES (12)..(12): (S)-2-amino-3-(thiophen-3-yl)propanoic acid
  MOD_RES (13)..(13): (S)-2-amino-3-(benzo[b]thiophen-3-yl)propanoic acid
  C-term amino
XDLXDEAAFNXXX

SEQ ID NO: 468 - protein, 13 aa, Artificial Sequence
  Description of Artificial Sequence: Synthetic peptide
  N-term Acetic Acid
  MOD_RES (1)..(1): (R)-2-allylpyrrolidine-2-carboxylic acid
  MOD_RES (3)..(3): (S)-2-amino-4,4-dimethylpentanoic acid
  MOD_RES (4)..(4): 2-amino-2-(pent-4-en-1-yl)hept-6-enoic acid
  MOD_RES (11)..(11): (S)-2-amino-2-methyldec-9-enoic acid
  MOD_RES (12)..(12): (S)-2-amino-3-(thiophen-3-yl)propanoic acid
  MOD_RES (13)..(13): (S)-2-amino-3-(benzo[b]thiophen-3-yl)propanoic acid
  C-term amino
XDXXDEAAFNXXX

SEQ ID NO: 469 - protein, 13 aa, Artificial Sequence
  Description of Artificial Sequence: Synthetic peptide
  N-term Acetic Acid
  MOD_RES (1)..(1): (R)-2-allylpyrrolidine-2-carboxylic acid
  MOD_RES (4)..(4): 2-amino-2-(pent-4-en-1-yl)hept-6-enoic acid
  MOD_RES (11)..(11): (S)-2-amino-2-methyldec-9-enoic acid
  MOD_RES (12)..(12): (S)-2-amino-3-(thiophen-3-yl)propanoic acid
  MOD_RES (13)..(13): (S)-2-amino-3-(benzo[b]thiophen-3-yl)propanoic acid
  C-term amino
XDIXDEAAFNXXX

SEQ ID NO: 470 - protein, 14 aa, Artificial Sequence
  Description of Artificial Sequence: Synthetic peptide
  N-term Acetic Acid
  MOD_RES (1)..(1): (R)-2-allylpyrrolidine-2-carboxylic acid
  MOD_RES (4)..(4): 2-amino-2-(pent-4-en-1-yl)hept-6-enoic acid
  MOD_RES (9)..(9): (S)-2-amino-3-cyclohexylpropanoic acid
  MOD_RES (11)..(11): (S)-2-amino-2-methyldec-9-enoic acid
  MOD_RES (13)..(13): (S)-2-amino-3-(benzo[b]thiophen-3-yl)propanoic acid
  C-term amino
XDIXDEAAXQXFXQ

SEQ ID NO: 471 - protein, 14 aa, Artificial Sequence
  Description of Artificial Sequence: Synthetic peptide
  N-term Acetic Acid
  MOD_RES (1)..(1): (R)-2-allylpyrrolidine-2-carboxylic acid
  MOD_RES (4)..(4): 2-amino-2-(pent-4-en-1-yl)hept-6-enoic acid
  MOD_RES (9)..(9): (S)-3-([1,1'-biphenyl]-4-yl)-2-aminopropanoic acid
  MOD_RES (11)..(11): (S)-2-amino-2-methyldec-9-enoic acid
  MOD_RES (13)..(13): (S)-2-amino-3-(benzo[b]thiophen-3-yl)propanoic acid
  C-term amino
XDIXDEAAXQXFXQ

SEQ ID NO: 472 - protein, 14 aa, Artificial Sequence
  Description of Artificial Sequence: Synthetic peptide
  N-term Acetic Acid
  MOD_RES (1)..(1): (R)-2-allylpyrrolidine-2-carboxylic acid
  MOD_RES (4)..(4): 2-amino-2-(pent-4-en-1-yl)hept-6-enoic acid
  MOD_RES (9)..(9): (S)-2-amino-3-(3-methoxyphenyl)propanoic acid
  MOD_RES (11)..(11): (S)-2-amino-2-methyldec-9-enoic acid
  MOD_RES (13)..(13): (S)-2-amino-3-(benzo[b]thiophen-3-yl)propanoic acid
  C-term amino
XDIXDEAAFQXFXQ

SEQ ID NO: 473 - protein, 14 aa, Artificial Sequence
  Description of Artificial Sequence: Synthetic peptide
  N-term Acetic Acid
  MOD_RES (1)..(1): (R)-2-allylpyrrolidine-2-carboxylic acid
  MOD_RES (4)..(4): 2-amino-2-(pent-4-en-1-yl)hept-6-enoic acid
  MOD_RES (9)..(9): (S)-2-amino-3,3-diphenylpropanoic acid
  MOD_RES (11)..(11): (S)-2-amino-2-methyldec-9-enoic acid
  MOD_RES (13)..(13): (S)-2-amino-3-(benzo[b]thiophen-3-yl)propanoic acid
  C-term amino
XDIXDEAAXQXFXQ

SEQ ID NO: 474 - protein, 14 aa, Artificial Sequence
  Description of Artificial Sequence: Synthetic peptide
  N-term Acetic Acid
  MOD_RES (1)..(1): (R)-2-allylpyrrolidine-2-carboxylic acid
  MOD_RES (4)..(4): 2-amino-2-(pent-4-en-1-yl)hept-6-enoic acid
  MOD_RES (9)..(9): (S)-2-amino-2-phenylacetic acid
  MOD_RES (11)..(11): (S)-2-amino-2-methyldec-9-enoic acid
  MOD_RES (13)..(13): (S)-2-amino-3-(benzo[b]thiophen-3-yl)propanoic acid
  C-term amino
XDIXDEAAXQXFXQ

SEQ ID NO: 475 - protein, 14 aa, Artificial Sequence
  Description of Artificial Sequence: Synthetic peptide
  N-term Acetic Acid
  MOD_RES (1)..(1): (R)-2-allylpyrrolidine-2-carboxylic acid
  MOD_RES (4)..(4): 2-amino-2-(pent-4-en-1-yl)hept-6-enoic acid
  MOD_RES (9)..(9): (S)-2-amino-4,4-dimethylpentanoic acid
  MOD_RES (11)..(11): (S)-2-amino-2-methyldec-9-enoic acid
  MOD_RES (13)..(13): (S)-2-amino-3-(benzo[b]thiophen-3-yl)propanoic acid
  C-term amino
XDIXDEAAXQXFXQ

SEQ ID NO: 476 - protein, 14 aa, Artificial Sequence
  Description of Artificial Sequence: Synthetic peptide
  N-term Acetic Acid
  MOD_RES (1)..(1): (R)-2-allylpyrrolidine-2-carboxylic acid
  MOD_RES (4)..(4): 2-amino-2-(pent-4-en-1-yl)hept-6-enoic acid
  MOD_RES (9)..(9): (S)-2-aminohexanoic acid
  MOD_RES (11)..(11): (S)-2-amino-2-methyldec-9-enoic acid
  MOD_RES (13)..(13): (S)-2-amino-3-(benzo[b]thiophen-3-yl)propanoic acid
  C-term amino
XDIXDEAAXQXFXQ

SEQ ID NO: 477 - protein, 15 aa, Artificial Sequence
  Description of Artificial Sequence: Synthetic peptide
  N-term Acetic Acid
  MOD_RES (1)..(1): (R)-2-allylpyrrolidine-2-carboxylic acid
  MOD_RES (4)..(4): 2-amino-2-(pent-4-en-1-yl)hept-6-enoic acid
  MOD_RES (11)..(11): (S)-2-amino-2-methyldec-9-enoic acid
  MOD_RES (13)..(13): (S)-2-amino-3-(benzo[b]thiophen-3-yl)propanoic acid
  C-term amino
XDLXDEAAFNXFXQA

SEQ ID NO: 478 - protein, 15 aa, Artificial Sequence
  Description of Artificial Sequence: Synthetic peptide
  N-term Acetic Acid
  MOD_RES (1)..(1): (R)-2-allylpyrrolidine-2-carboxylic acid
  MOD_RES (4)..(4): 2-amino-2-(pent-4-en-1-yl)hept-6-enoic acid
  MOD_RES (11)..(11): (S)-2-amino-2-methyldec-9-enoic acid
  MOD_RES (13)..(13): (S)-2-amino-3-(benzo[b]thiophen-3-yl)propanoic acid
  MOD_RES (15)..(15): D-alanine
  C-term amino
XDLXDEAAFNXFXQA

SEQ ID NO: 479 - protein, 15 aa, Artificial Sequence
  Description of Artificial Sequence: Synthetic peptide
  N-term Acetic Acid
  MOD_RES (1)..(1): (R)-2-allylpyrrolidine-2-carboxylic acid
  MOD_RES (4)..(4): 2-amino-2-(pent-4-en-1-yl)hept-6-enoic acid
  MOD_RES (11)..(11): (S)-2-amino-2-methyldec-9-enoic acid
  MOD_RES (13)..(13): (S)-2-amino-3-(benzo[b]thiophen-3-yl)propanoic acid
  C-term amino
XDLXDEAAFNXFXQI

SEQ ID NO: 480 - protein, 15 aa, Artificial Sequence
  Description of Artificial Sequence: Synthetic peptide
  N-term Acetic Acid
  MOD_RES (1)..(1): (R)-2-allylpyrrolidine-2-carboxylic acid
  MOD_RES (4)..(4): 2-amino-2-(pent-4-en-1-yl)hept-6-enoic acid
  MOD_RES (11)..(11): (S)-2-amino-2-methyldec-9-enoic acid
  MOD_RES (13)..(13): (S)-2-amino-3-(benzo[b]thiophen-3-yl)propanoic acid
  MOD_RES (15)..(15): D-isoleucine
  C-term amino
XDLXDEAAFNXFXQI

SEQ ID NO: 481 - protein, 15 aa, Artificial Sequence
  Description of Artificial Sequence: Synthetic peptide
  N-term Acetic Acid
  MOD_RES (1)..(1): (R)-2-allylpyrrolidine-2-carboxylic acid
  MOD_RES (4)..(4): 2-amino-2-(pent-4-en-1-yl)hept-6-enoic acid
  MOD_RES (11)..(11): (S)-2-amino-2-methyldec-9-enoic acid
  MOD_RES (13)..(13): (S)-2-amino-3-(benzo[b]thiophen-3-yl)propanoic acid
  MOD_RES (15)..(15): 2-amino-2-methylpropanoic acid
  C-term amino
XDLXDEAAFNXFXQX

SEQ ID NO: 482 - protein, 15 aa, Artificial Sequence
  Description of Artificial Sequence: Synthetic peptide
  N-term Acetic Acid
  MOD_RES (1)..(1): (R)-2-allylpyrrolidine-2-carboxylic acid
  MOD_RES (4)..(4): 2-amino-2-(pent-4-en-1-yl)hept-6-enoic acid
  MOD_RES (11)..(11): (S)-2-amino-2-methyldec-9-enoic acid
  MOD_RES (13)..(13): (S)-2-amino-3-(benzo[b]thiophen-3-yl)propanoic acid
  C-term amino
XDLXDEAAFNXFXHA

SEQ ID NO: 483 - protein, 15 aa, Artificial Sequence
  Description of Artificial Sequence: Synthetic peptide
  N-term Acetic Acid
  MOD_RES (1)..(1): (R)-2-allylpyrrolidine-2-carboxylic acid
  MOD_RES (4)..(4): 2-amino-2-(pent-4-en-1-yl)hept-6-enoic acid
  MOD_RES (11)..(11): (S)-2-amino-2-methyldec-9-enoic acid
  MOD_RES (13)..(13): (S)-2-amino-3-(benzo[b]thiophen-3-yl)propanoic acid
  MOD_RES (15)..(15): D-alanine
  C-term amino
XDLXDEAAFNXFXHA

SEQ ID NO: 484 - protein, 15 aa, Artificial Sequence
  Description of Artificial Sequence: Synthetic peptide
  N-term Acetic Acid
  MOD_RES (1)..(1): (R)-2-allylpyrrolidine-2-carboxylic acid
  MOD_RES (4)..(4): 2-amino-2-(pent-4-en-1-yl)hept-6-enoic acid
  MOD_RES (11)..(11): (S)-2-amino-2-methyldec-9-enoic acid
  MOD_RES (13)..(13): (S)-2-amino-3-(benzo[b]thiophen-3-yl)propanoic acid
  C-term amino
XDLXDEAAFNXFXHI

SEQ ID NO: 485 - protein, 15 aa, Artificial Sequence
  Description of Artificial Sequence: Synthetic peptide
  N-term Acetic Acid
  MOD_RES (1)..(1): (R)-2-allylpyrrolidine-2-carboxylic acid
  MOD_RES (4)..(4): 2-amino-2-(pent-4-en-1-yl)hept-6-enoic acid
  MOD_RES (11)..(11): (S)-2-amino-2-methyldec-9-enoic acid
  MOD_RES (13)..(13): (S)-2-amino-3-(benzo[b]thiophen-3-yl)propanoic acid
  MOD_RES (15)..(15): D-isoleucine
  C-term amino
XDLXDEAAFNXFXHI

SEQ ID NO: 486 - protein, 15 aa, Artificial Sequence
  Description of Artificial Sequence: Synthetic peptide
  N-term Acetic Acid
  MOD_RES (1)..(1): (R)-2-allylpyrrolidine-2-carboxylic acid
  MOD_RES (4)..(4): 2-amino-2-(pent-4-en-1-yl)hept-6-enoic acid
  MOD_RES (11)..(11): (S)-2-amino-2-methyldec-9-enoic acid
  MOD_RES (13)..(13): (S)-2-amino-3-(benzo[b]thiophen-3-yl)propanoic acid
  MOD_RES (15)..(15): 2-amino-2-methylpropanoic acid
  C-term amino
XDLXDEAAFNXFXHX

SEQ ID NO: 487 - protein, 14 aa, Artificial Sequence
  Description of Artificial Sequence: Synthetic peptide
  N-term Acetic Acid
  MOD_RES (1)..(1): (R)-2-allylpyrrolidine-2-carboxylic acid
  MOD_RES (4)..(4): 2-amino-2-(pent-4-en-1-yl)hept-6-enoic acid
  MOD_RES (11)..(11): (S)-2-amino-2-methyldec-9-enoic acid
  MOD_RES (13)..(13): (S)-2-amino-3-(benzo[b]thiophen-3-yl)propanoic acid
  MOD_RES (14)..(14): D-histidine
  C-term amino
XDLXDEAAFNXFXH

SEQ ID NO: 488 - protein, 14 aa, Artificial Sequence
  Description of Artificial Sequence: Synthetic peptide
  N-term Acetic Acid
  MOD_RES (1)..(1): (R)-2-allylpyrrolidine-2-carboxylic acid
  MOD_RES (4)..(4): 2-amino-2-(pent-4-en-1-yl)hept-6-enoic acid
  MOD_RES (11)..(11): (S)-2-amino-2-methyldec-9-enoic acid
  MOD_RES (13)..(13): (S)-2-amino-3-(benzo[b]thiophen-3-yl)propanoic acid
  MOD_RES (14)..(14): methyl-L-histidine
  C-term amino
XDLXDEAAFNXFXH

SEQ ID NO: 489 - protein, 14 aa, Artificial Sequence
  Description of Artificial Sequence: Synthetic peptide
  N-term Acetic Acid
  MOD_RES (1)..(1): (R)-2-allylpyrrolidine-2-carboxylic acid
  MOD_RES (4)..(4): 2-amino-2-(pent-4-en-1-yl)hept-6-enoic acid
  MOD_RES (11)..(11): (S)-2-amino-2-methyldec-9-enoic acid
  MOD_RES (13)..(13): (S)-2-amino-3-(benzo[b]thiophen-3-yl)propanoic acid
  C-term amino
XDLXDEAAFNXFXT

SEQ ID NO: 490 - protein, 14 aa, Artificial Sequence
  Description of Artificial Sequence: Synthetic peptide
  N-term Acetic Acid
  MOD_RES (1)..(1): (R)-2-allylpyrrolidine-2-carboxylic acid
  MOD_RES (4)..(4): 2-amino-2-(pent-4-en-1-yl)hept-6-enoic acid
  MOD_RES (11)..(11): (S)-2-amino-2-methyldec-9-enoic acid
  MOD_RES (13)..(13): (S)-2-amino-3-(benzo[b]thiophen-3-yl)propanoic acid
  C-term amino
XDLXDEAAFNXFXS

SEQ ID NO: 491 - protein, 14 aa, Artificial Sequence
  Description of Artificial Sequence: Synthetic peptide
  N-term Acetic Acid
  MOD_RES (1)..(1): (R)-2-allylpyrrolidine-2-carboxylic acid
  MOD_RES (4)..(4): 2-amino-2-(pent-4-en-1-yl)hept-6-enoic acid
  MOD_RES (11)..(11): (S)-2-amino-2-methyldec-9-enoic acid
  MOD_RES (13)..(13): (S)-2-amino-3-(benzo[b]thiophen-3-yl)propanoic acid
  C-term amino
XDLXDEAAFNXFXN

SEQ ID NO: 492 - protein, 14 aa, Artificial Sequence
  Description of Artificial Sequence: Synthetic peptide
  N-term Acetic Acid
  MOD_RES (1)..(1): (R)-2-allylpyrrolidine-2-carboxylic acid
  MOD_RES (4)..(4): 2-amino-2-(pent-4-en-1-yl)hept-6-enoic acid
  MOD_RES (11)..(11): (S)-2-amino-2-methyldec-9-enoic acid
  MOD_RES (13)..(13): (S)-2-amino-3-(benzo[b]thiophen-3-yl)propanoic acid
  MOD_RES (14)..(14): D-threonine
  C-term amino
XDLXDEAAFNXFXT

SEQ ID NO: 493 - protein, 14 aa, Artificial Sequence
  Description of Artificial Sequence: Synthetic peptide
  N-term Acetic Acid
  MOD_RES (1)..(1): (R)-2-allylpyrrolidine-2-carboxylic acid
  MOD_RES (4)..(4): 2-amino-2-(pent-4-en-1-yl)hept-6-enoic acid
  MOD_RES (11)..(11): (S)-2-amino-2-methyldec-9-enoic acid
  MOD_RES (13)..(13): (S)-2-amino-3-(benzo[b]thiophen-3-yl)propanoic acid
  MOD_RES (14)..(14): D-serine
  C-term amino
XDLXDEAAFNXFXS

SEQ ID NO: 494 - protein, 14 aa, Artificial Sequence
  Description of Artificial Sequence: Synthetic peptide
  N-term Acetic Acid
  MOD_RES (1)..(1): (R)-2-allylpyrrolidine-2-carboxylic acid
  MOD_RES (4)..(4): 2-amino-2-(pent-4-en-1-yl)hept-6-enoic acid
  MOD_RES (11)..(11): (S)-2-amino-2-methyldec-9-enoic acid
  MOD_RES (13)..(13): (S)-2-amino-3-(benzo[b]thiophen-3-yl)propanoic acid
  MOD_RES (14)..(14): D-asparagine
  C-term amino
XDLXDEAAFNXFXN

SEQ ID NO: 495 - protein, 14 aa, Artificial Sequence
  Description of Artificial Sequence: Synthetic peptide
  N-term Acetic Acid
  MOD_RES (1)..(1): (R)-2-allylpyrrolidine-2-carboxylic acid
  MOD_RES (4)..(4): 2-amino-2-(pent-4-en-1-yl)hept-6-enoic acid
  MOD_RES (11)..(11): (S)-2-amino-2-methyldec-9-enoic acid
  MOD_RES (13)..(13): (S)-2-amino-3-(benzo[b]thiophen-3-yl)propanoic acid
  MOD_RES (14)..(14): methyl-L-serine
  C-term amino
XDLXDEAAFNXFXS

SEQ ID NO: 496 - protein, 14 aa, Artificial Sequence
  Description of Artificial Sequence: Synthetic peptide
  N-term Acetic Acid
  MOD_RES (1)..(1): (R)-2-allylpyrrolidine-2-carboxylic acid
  MOD_RES (3)..(3): (S)-2-amino-4,4-dimethylpentanoic acid
  MOD_RES (4)..(4): 2-amino-2-(pent-4-en-1-yl)hept-6-enoic acid
  MOD_RES (6)..(6): (S)-2-amino-3-((carboxymethyl)(2,2,2-trifluoroethyl)amino) propanoic acid
  MOD_RES (11)..(11): (S)-3-amino-1-((pent-4-en-1-yloxy)carbonyl)pyrrolidine-3- carboxylic acid
  MOD_RES (12)..(12): (S)-2-amino-3-(thiophen-3-yl)propanoic acid
  MOD_RES (13)..(13): (S)-2-amino-3-(benzo[b]thiophen-3-yl)propanoic acid
  C-term amino
XDXXDXAAFNXXXQ

SEQ ID NO: 497 - protein, 14 aa, Artificial Sequence
  Description of Artificial Sequence: Synthetic peptide
  N-term Acetic Acid
  MOD_RES (1)..(1): (R)-2-allylpyrrolidine-2-carboxylic acid
  MOD_RES (3)..(3): (S)-2-amino-4,4-dimethylpentanoic acid
  MOD_RES (4)..(4): 2-amino-2-(pent-4-en-1-yl)hept-6-enoic acid
  MOD_RES (11)..(11): (S)-3-amino-1-((pent-4-en-1-yloxy)carbonyl)pyrrolidine-3- carboxylic acid
  MOD_RES (12)..(12): (S)-2-amino-3-(thiophen-3-yl)propanoic acid
  MOD_RES (13)..(13): (S)-2-amino-3-(benzo[b]thiophen-3-yl)propanoic acid
  C-term amino
XDXXDDAAFQXXXQ

SEQ ID NO: 498 - protein, 14 aa, Artificial Sequence
  Description of Artificial Sequence: Synthetic peptide
  N-term Acetic Acid
  MOD_RES (1)..(1): (R)-2-allylpyrrolidine-2-carboxylic acid
  MOD_RES (3)..(3): (S)-2-amino-4,4-dimethylpentanoic acid
  MOD_RES (4)..(4): 2-amino-2-(pent-4-en-1-yl)hept-6-enoic acid
  MOD_RES (11)..(11): (S)-5-(((allyloxy)carbonyl)(methyl)amino)-2-amino-2- methylpentanoic acid
  MOD_RES (12)..(12): (S)-2-amino-3-(thiophen-3-yl)propanoic acid
  MOD_RES (13)..(13): (S)-2-amino-3-(benzo[b]thiophen-3-yl)propanoic acid
  C-term amino
XDXXDDAAFNXXXQ

SEQ ID NO: 499 - protein, 14 aa, Artificial Sequence
  Description of Artificial Sequence: Synthetic peptide
  N-term Acetic Acid
  MOD_RES (1)..(1): (R)-2-allylpyrrolidine-2-carboxylic acid
  MOD_RES (3)..(3): (S)-2-amino-4,4-dimethylpentanoic acid
  MOD_RES (4)..(4): 2-amino-2-(pent-4-en-1-yl)hept-6-enoic acid
  MOD_RES (11)..(11): (S)-3-amino-1-((hex-5-en-1-yloxy)carbonyl)pyrrolidine-3- carboxylic acid
  MOD_RES (12)..(12): (S)-2-amino-3-(thiophen-3-yl)propanoic acid
  MOD_RES (13)..(13): (S)-2-amino-3-(benzo[b]thiophen-3-yl)propanoic acid
  C-term amino
XDXXDDAAFNXXXQ

SEQ ID NO: 500 - protein, 14 aa, Artificial Sequence
  Description of Artificial Sequence: Synthetic peptide
  N-term Acetic Acid
  MOD_RES (1)..(1): (R)-2-allylpyrrolidine-2-carboxylic acid
  MOD_RES (3)..(3): (S)-2-amino-4,4-dimethylpentanoic acid
  MOD_RES (4)..(4): 2-amino-2-(pent-4-en-1-yl)hept-6-enoic acid
  MOD_RES (6)..(6): (S)-2-amino-3-((carboxymethyl)(2,2,2-trifluoroethyl)amino) propanoic acid
  MOD_RES (11)..(11): (S)-3-amino-1-((pent-4-en-1-yloxy)carbonyl)pyrrolidine-3- carboxylic acid
  MOD_RES (12)..(12): (S)-2-amino-3-(thiophen-3-yl)propanoic acid
  MOD_RES (13)..(13): (S)-2-amino-3-(benzo[b]thiophen-3-yl)propanoic acid
  C-term amino
XDXXDXAAFNXXXH

SEQ ID NO: 501 - protein, 14 aa, Artificial Sequence
  Description of Artificial Sequence: Synthetic peptide
  N-term Acetic Acid
  MOD_RES (1)..(1): (R)-2-allylpyrrolidine-2-carboxylic acid
  MOD_RES (3)..(3): (S)-2-amino-4,4-dimethylpentanoic acid
  MOD_RES (4)..(4): 2-amino-2-(pent-4-en-1-yl)hept-6-enoic acid
  MOD_RES (11)..(11): (S)-3-amino-1-((pent-4-en-1-yloxy)carbonyl)pyrrolidine-3- carboxylic acid
  MOD_RES (12)..(12): (S)-2-amino-3-(thiophen-3-yl)propanoic acid
  MOD_RES (13)..(13): (S)-2-amino-3-(benzo[b]thiophen-3-yl)propanoic acid
  C-term amino
XDXXDDAAFQXXXH

SEQ ID NO: 502 - protein, 14 aa, Artificial Sequence
  Description of Artificial Sequence: Synthetic peptide
  N-term Acetic Acid
  MOD_RES (1)..(1): (R)-2-allylpyrrolidine-2-carboxylic acid
  MOD_RES (3)..(3): (S)-2-amino-4,4-dimethylpentanoic acid
  MOD_RES (4)..(4): 2-amino-2-(pent-4-en-1-yl)hept-6-enoic acid
  MOD_RES (11)..(11): (S)-5-(((allyloxy)carbonyl)(methyl)amino)-2-amino-2- methylpentanoic acid
  MOD_RES (12)..(12): (S)-2-amino-3-(thiophen-3-yl)propanoic acid
  MOD_RES (13)..(13): (S)-2-amino-3-(benzo[b]thiophen-3-yl)propanoic acid
  C-term amino
XDXXDDAAFNXXXH

SEQ ID NO: 503 - protein, 14 aa, Artificial Sequence
  Description of Artificial Sequence: Synthetic peptide
  N-term Acetic Acid
  MOD_RES (1)..(1): (R)-2-allylpyrrolidine-2-carboxylic acid
  MOD_RES (3)..(3): (S)-2-amino-4,4-dimethylpentanoic acid
  MOD_RES (4)..(4): 2-amino-2-(pent-4-en-1-yl)hept-6-enoic acid
  MOD_RES (11)..(11): (S)-3-amino-1-((hex-5-en-1-yloxy)carbonyl)pyrrolidine-3- carboxylic acid
  MOD_RES (12)..(12): (S)-2-amino-3-(thiophen-3-yl)propanoic acid
  MOD_RES (13)..(13): (S)-2-amino-3-(benzo[b]thiophen-3-yl)propanoic acid
  C-term amino
XDXXDDAAFNXXXH

SEQ ID NO: 504 - protein, 14 aa, Artificial Sequence
  Description of Artificial Sequence: Synthetic peptide
  N-term Acetic Acid
  MOD_RES (1)..(1): (R)-2-allylpyrrolidine-2-carboxylic acid
  MOD_RES (3)..(3): (S)-2-amino-4,4-dimethylpentanoic acid
  MOD_RES (4)..(4): 2-amino-2-(pent-4-en-1-yl)hept-6-enoic acid
  MOD_RES (11)..(11): (S)-3-amino-1-((pent-4-en-1-yloxy)carbonyl)pyrrolidine-3- carboxylic acid
  MOD_RES (13)..(13): (S)-2-amino-3-(benzo[b]thiophen-3-yl)propanoic acid
  C-term amino
XDXXDDAAFNXFXH

SEQ ID NO: 505 - protein, 14 aa, Artificial Sequence
  Description of Artificial Sequence: Synthetic peptide
  N-term Acetic Acid
  MOD_RES (1)..(1): (R)-2-allylpyrrolidine-2-carboxylic acid
  MOD_RES (3)..(3): (S)-2-amino-4,4-dimethylpentanoic acid
  MOD_RES (4)..(4): 2-amino-2-(pent-4-en-1-yl)hept-6-enoic acid
  MOD_RES (11)..(11): (S)-3-amino-1-((pent-4-en-1-yloxy)carbonyl)pyrrolidine-3- carboxylic acid
  MOD_RES (12)..(12): (S)-2-amino-3-(thiophen-2-yl)propanoic acid
  MOD_RES (13)..(13): (S)-2-amino-3-(benzo[b]thiophen-3-yl)propanoic acid
  C-term amino
XDXXDDAAFNXXXQ

SEQ ID NO: 506 - protein, 14 aa, Artificial Sequence
  Description of Artificial Sequence: Synthetic peptide
  N-term Acetic Acid
  MOD_RES (1)..(1): (R)-2-allylpyrrolidine-2-carboxylic acid
  MOD_RES (3)..(3): (S)-2-amino-4,4-dimethylpentanoic acid
  MOD_RES (4)..(4): 2-amino-2-(pent-4-en-1-yl)hept-6-enoic acid
  MOD_RES (11)..(11): (S)-3-amino-1-((pent-4-en-1-yloxy)carbonyl)pyrrolidine-3- carboxylic acid
  MOD_RES (12)..(12): (S)-2-amino-3-(thiophen-2-yl)propanoic acid
  MOD_RES (13)..(13): (S)-2-amino-3-(benzo[b]thiophen-3-yl)propanoic acid
  C-term amino
XDXXDDAAFNXXXH

SEQ ID NO: 507 - protein, 14 aa, Artificial Sequence
  Description of Artificial Sequence: Synthetic peptide
  N-term Acetic Acid
  MOD_RES (1)..(1): (R)-2-allylpyrrolidine-2-carboxylic acid
  MOD_RES (3)..(3): (S)-2-amino-4,4-dimethylpentanoic acid
  MOD_RES (4)..(4): 2-amino-2-(pent-4-en-1-yl)hept-6-enoic acid
  MOD_RES (11)..(11): (S)-3-amino-1-((pent-4-en-1-yloxy)carbonyl)pyrrolidine-3- carboxylic acid
  MOD_RES (12)..(12): (S)-2-amino-3-(2-methoxyphenyl)propanoic acid
  MOD_RES (13)..(13): (S)-2-amino-3-(benzo[b]thiophen-3-yl)propanoic acid
  C-term amino
XDXXDDAAFNXFXQ

SEQ ID NO: 508 - protein, 14 aa, Artificial Sequence
  Description of Artificial Sequence: Synthetic peptide
  N-term Acetic Acid
  MOD_RES (1)..(1): (R)-2-allylpyrrolidine-2-carboxylic acid
  MOD_RES (3)..(3): (S)-2-amino-4,4-dimethylpentanoic acid
  MOD_RES (4)..(4): 2-amino-2-(pent-4-en-1-yl)hept-6-enoic acid
  MOD_RES (11)..(11): (S)-3-amino-1-((pent-4-en-1-yloxy)carbonyl)pyrrolidine-3- carboxylic acid
  MOD_RES (12)..(12): (S)-2-amino-3-(2-methoxyphenyl)propanoic acid
  MOD_RES (13)..(13): (S)-2-amino-3-(benzo[b]thiophen-3-yl)propanoic acid
  C-term amino
XDXXDDAAFNXFXH

SEQ ID NO: 509 - protein, 14 aa, Artificial Sequence
  Description of Artificial Sequence: Synthetic peptide
  N-term Acetic Acid
  MOD_RES (1)..(1): (R)-2-allylpyrrolidine-2-carboxylic acid
  MOD_RES (3)..(3): (S)-2-amino-4,4-dimethylpentanoic acid
  MOD_RES (4)..(4): 2-amino-2-(pent-4-en-1-yl)hept-6-enoic acid
  MOD_RES (11)..(11): (S)-3-amino-1-((pent-4-en-1-yloxy)carbonyl)pyrrolidine-3- carboxylic acid
  MOD_RES (12)..(12): (S)-2-amino-3-(o-tolyl)propanoic acid
  MOD_RES (13)..(13): (S)-2-amino-3-(benzo[b]thiophen-3-yl)propanoic acid
  C-term amino
XDXXDDAAFNXXXH

SEQ ID NO: 510 - protein, 14 aa, Artificial Sequence
  Description of Artificial Sequence: Synthetic peptide
  N-term Acetic Acid
  MOD_RES (1)..(1): (R)-2-allylpyrrolidine-2-carboxylic acid
  MOD_RES (3)..(3): (S)-2-amino-4,4-dimethylpentanoic acid
  MOD_RES (4)..(4): 2-amino-2-(pent-4-en-1-yl)hept-6-enoic acid
  MOD_RES (11)..(11): (S)-3-amino-1-((pent-4-en-1-yloxy)carbonyl)pyrrolidine-3- carboxylic acid
  MOD_RES (12)..(12): (S)-2-amino-3-(2-chlorophenyl)propanoic acid
  MOD_RES (13)..(13): (S)-2-amino-3-(benzo[b]thiophen-3-yl)propanoic acid
  C-term amino
XDXXDDAAFNXFXQ

SEQ ID NO: 511 - protein, 14 aa, Artificial Sequence
  Description of Artificial Sequence: Synthetic peptide
  N-term Acetic Acid
  MOD_RES (1)..(1): (R)-2-allylpyrrolidine-2-carboxylic acid
  MOD_RES (3)..(3): (S)-2-amino-4,4-dimethylpentanoic acid
  MOD_RES (4)..(4): 2-amino-2-(pent-4-en-1-yl)hept-6-enoic acid
  MOD_RES (11)..(11): (S)-3-amino-1-((pent-4-en-1-yloxy)carbonyl)pyrrolidine-3- carboxylic acid
  MOD_RES (12)..(12): (S)-2-amino-3-(2-chlorophenyl)propanoic acid
  MOD_RES (13)..(13): (S)-2-amino-3-(benzo[b]thiophen-3-yl)propanoic acid
  C-term amino
XDXXDDAAFNXFXH

SEQ ID NO: 512 - protein, 13 aa, Artificial Sequence
  Description of Artificial Sequence: Synthetic peptide
  N-term Acetic Acid
  MOD_RES (1)..(1): (R)-2-allylpyrrolidine-2-carboxylic acid
  MOD_RES (3)..(3): (S)-2-amino-4,4-dimethylpentanoic acid
  MOD_RES (4)..(4): 2-amino-2-(pent-4-en-1-yl)hept-6-enoic acid
  MOD_RES (11)..(11): (S)-3-amino-1-((pent-4-en-1-yloxy)carbonyl)pyrrolidine-3- carboxylic acid
  MOD_RES (12)..(12): (S)-2-amino-3-(thiophen-3-yl)propanoic acid
  MOD_RES (13)..(13): (S)-2-amino-3-(benzo[b]thiophen-3-yl)propanoic acid
  C-term amino
XDXXDDAAFNXXX

SEQ ID NO: 513 - protein, 13 aa, Artificial Sequence
  Description of Artificial Sequence: Synthetic peptide
  N-term Acetic Acid
  MOD_RES (1)..(1): (R)-2-allylpyrrolidine-2-carboxylic acid
  MOD_RES (3)..(3): (S)-2-amino-4,4-dimethylpentanoic acid
  MOD_RES (4)..(4): 2-amino-2-(pent-4-en-1-yl)hept-6-enoic acid
  MOD_RES (11)..(11): (S)-3-amino-1-((pent-4-en-1-yloxy)carbonyl)pyrrolidine-3- carboxylic acid
  MOD_RES (12)..(12): (S)-2-amino-3-(thiophen-3-yl)propanoic acid
  MOD_RES (13)..(13): (S)-2-amino-3-(benzo[b]thiophen-3-yl)propanoic acid
  C-term amino
XDXXDEAAFNXXX

SEQ ID NO: 514 - protein, 14 aa, Artificial Sequence
  Description of Artificial Sequence: Synthetic peptide
  N-term Acetic Acid
  MOD_RES (1)..(1): (R)-2-allylpyrrolidine-2-carboxylic acid
  MOD_RES (3)..(3): (S)-2-amino-5-methylhexanoic acid
  MOD_RES (4)..(4): 2-amino-2-(pent-4-en-1-yl)hept-6-enoic acid
  MOD_RES (11)..(11): (S)-3-amino-1-((pent-4-en-1-yloxy)carbonyl)pyrrolidine-3- carboxylic acid
  MOD_RES (12)..(12): (S)-2-amino-3-(thiophen-3-yl)propanoic acid
  MOD_RES (13)..(13): (S)-2-amino-3-(benzo[b]thiophen-3-yl)propanoic acid
  C-term amino
XDXXDDAAFNXXXQ

SEQ ID NO: 515 - protein, 14 aa, Artificial Sequence
  Description of Artificial Sequence: Synthetic peptide
  N-term Acetic Acid
  MOD_RES (1)..(1): (R)-2-allylpyrrolidine-2-carboxylic acid
  MOD_RES (3)..(3): (S)-2-amino-5-methylhexanoic acid
  MOD_RES (4)..(4): 2-amino-2-(pent-4-en-1-yl)hept-6-enoic acid
  MOD_RES (11)..(11): (S)-3-amino-1-((pent-4-en-1-yloxy)carbonyl)pyrrolidine-3- carboxylic acid
  MOD_RES (12)..(12): (S)-2-amino-3-(thiophen-3-yl)propanoic acid
  MOD_RES (13)..(13): (S)-2-amino-3-(benzo[b]thiophen-3-yl)propanoic acid
  C-term amino
XDXXDDAAFNXXXH

SEQ ID NO: 516 - protein, 14 aa, Artificial Sequence
  Description of Artificial Sequence: Synthetic peptide
  N-term Acetic Acid
  MOD_RES (1)..(1): (R)-2-allylpyrrolidine-2-carboxylic acid
  MOD_RES (3)..(3): (S)-2-amino-4,4-dimethylpentanoic acid
  MOD_RES (4)..(4): 2-amino-2-(pent-4-en-1-yl)hept-6-enoic acid
  MOD_RES (11)..(11): (S)-3-amino-1-((pent-4-en-1-yloxy)carbonyl)pyrrolidine-3- carboxylic acid
  MOD_RES (12)..(12): (S)-2-amino-3-(thiophen-3-yl)propanoic acid
  MOD_RES (13)..(13): (S)-2-amino-3-(naphthalen-1-yl)propanoic acid
  C-term amino
XDXXDDAAFNXXXH

SEQ ID NO: 517 - protein, 14 aa, Artificial Sequence
  Description of Artificial Sequence: Synthetic peptide
  N-term Acetic Acid
  MOD_RES (1)..(1): (R)-2-allylpyrrolidine-2-carboxylic acid
  MOD_RES (3)..(3): (S)-2-amino-4,4-dimethylpentanoic acid
  MOD_RES (4)..(4): 2-amino-2-(pent-4-en-1-yl)hept-6-enoic acid
  MOD_RES (11)..(11): (S)-3-amino-1-((pent-4-en-1-yloxy)carbonyl)pyrrolidine-3- carboxylic acid
  MOD_RES (12)..(12): (S)-2-amino-3-(thiophen-3-yl)propanoic acid
  MOD_RES (13)..(13): (S)-2-amino-3-(naphthalen-2-yl)propanoic acid
  C-term amino
XDXXDDAAFNXXXH

SEQ ID NO: 518 - protein, 14 aa, Artificial Sequence
  Description of Artificial Sequence: Synthetic peptide
  N-term Acetic Acid
  MOD_RES (1)..(1): (R)-2-allylpyrrolidine-2-carboxylic acid
  MOD_RES (3)..(3): (S)-2-amino-4,4-dimethylpentanoic acid
  MOD_RES (4)..(4): 2-amino-2-(pent-4-en-1-yl)hept-6-enoic acid
  MOD_RES (11)..(11): (S)-3-amino-1-((pent-4-en-1-yloxy)carbonyl)pyrrolidine-3- carboxylic acid
  MOD_RES (12)..(12): (S)-2-amino-3-(thiophen-3-yl)propanoic acid
  MOD_RES (13)..(13): (S)-2-amino-3-(5-chloro-1H-indol-3-yl)propanoic acid
  C-term amino
XDXXDDAAFNXXXH

SEQ ID NO: 519 - protein, 14 aa, Artificial Sequence
  Description of Artificial Sequence: Synthetic peptide
  N-term Acetic Acid
  MOD_RES (1)..(1): (R)-2-allylpyrrolidine-2-carboxylic acid
  MOD_RES (3)..(3): (S)-2-amino-4,4-dimethylpentanoic acid
  MOD_RES (4)..(4): 2-amino-2-(pent-4-en-1-yl)hept-6-enoic acid
  MOD_RES (11)..(11): (S)-3-amino-1-((pent-4-en-1-yloxy)carbonyl)pyrrolidine-3- carboxylic acid
  MOD_RES (12)..(12): (S)-2-amino-3-(thiophen-3-yl)propanoic acid
  C-term amino
XDXXDDAAFNXXWH

SEQ ID NO: 520 - protein, 14 aa, Artificial Sequence
  Description of Artificial Sequence: Synthetic peptide
  N-term Acetic Acid
  MOD_RES (1)..(1): (R)-2-allylpyrrolidine-2-carboxylic acid
  MOD_RES (3)..(3): (S)-2-amino-4,4-dimethylpentanoic acid
  MOD_RES (4)..(4): 2-amino-2-(pent-4-en-1-yl)hept-6-enoic acid
  MOD_RES (11)..(11): (S)-3-amino-1-((pent-4-en-1-yloxy)carbonyl)pyrrolidine-3- carboxylic acid
  MOD_RES (12)..(12): (S)-2-amino-3-(benzo[b]thiophen-3-yl)propanoic acid
  MOD_RES (13)..(13): (S)-2-amino-3-(benzo[b]thiophen-3-yl)propanoic acid
  C-term amino
XDXXDDAAFNXXXH

SEQ ID NO: 521 - protein, 14 aa, Artificial Sequence
  Description of Artificial Sequence: Synthetic peptide
  N-term Acetic Acid
  MOD_RES (1)..(1): (R)-2-allylpyrrolidine-2-carboxylic acid
  MOD_RES (3)..(3): (S)-2-amino-4,4-dimethylpentanoic acid
  MOD_RES (4)..(4): 2-amino-2-(pent-4-en-1-yl)hept-6-enoic acid
  MOD_RES (11)..(11): (S)-3-amino-1-((pent-4-en-1-yloxy)carbonyl)pyrrolidine-3- carboxylic acid
  MOD_RES (12)..(12): (S)-2-amino-3-(naphthalen-1-yl)propanoic acid
  MOD_RES (13)..(13): (S)-2-amino-3-(benzo[b]thiophen-3-yl)propanoic acid
  C-term amino
XDXXDDAAFNXXXH

SEQ ID NO: 522 - protein, 14 aa, Artificial Sequence
  Description of Artificial Sequence: Synthetic peptide
  N-term Acetic Acid
  MOD_RES (1)..(1): (R)-2-allylpyrrolidine-2-carboxylic acid
  MOD_RES (3)..(3): (S)-2-amino-4,4-dimethylpentanoic acid
  MOD_RES (4)..(4): 2-amino-2-(pent-4-en-1-yl)hept-6-enoic acid
  MOD_RES (11)..(11): (S)-3-amino-1-((pent-4-en-1-yloxy)carbonyl)pyrrolidine-3- carboxylic acid
  MOD_RES (12)..(12): (S)-2-amino-3-(naphthalen-2-yl)propanoic acid
  MOD_RES (13)..(13): (S)-2-amino-3-(benzo[b]thiophen-3-yl)propanoic acid
  C-term amino
XDXXDDAAFNXXXH

SEQ ID NO: 523 - protein, 14 aa, Artificial Sequence
  Description of Artificial Sequence: Synthetic peptide
  N-term Acetic Acid
  MOD_RES (1)..(1): (R)-2-allylpyrrolidine-2-carboxylic acid
  MOD_RES (3)..(3): (S)-2-amino-4,4-dimethylpentanoic acid
  MOD_RES (4)..(4): 2-amino-2-(pent-4-en-1-yl)hept-6-enoic acid
  MOD_RES (11)..(11): (S)-3-amino-1-((pent-4-en-1-yloxy)carbonyl)pyrrolidine-3- carboxylic acid
  MOD_RES (12)..(12): (S)-2-amino-3-(thiophen-3-yl)propanoic acid
  MOD_RES (13)..(13): (S)-2-amino-3-(benzo[b]thiophen-3-yl)propanoic acid
  C-term amino
XFXXDDAADNXXXH

SEQ ID NO: 524 - protein, 14 aa, Artificial Sequence
  Description of Artificial Sequence: Synthetic peptide
  N-term Acetic Acid
  MOD_RES (1)..(1): (R)-2-allylpyrrolidine-2-carboxylic acid
  MOD_RES (3)..(3): (S)-2-amino-4,4-dimethylpentanoic acid
  MOD_RES (4)..(4): 2-amino-2-(pent-4-en-1-yl)hept-6-enoic acid
  MOD_RES (11)..(11): (S)-3-amino-1-((pent-4-en-1-yloxy)carbonyl)pyrrolidine-3- carboxylic acid
  MOD_RES (12)..(12): (S)-2-amino-3-(thiophen-3-yl)propanoic acid
  MOD_RES (13)..(13): (S)-2-amino-3-(benzo[b]thiophen-3-yl)propanoic acid
  C-term amino
XFXXDDAADNXXXQ

SEQ ID NO: 525 - protein, 14 aa, Artificial Sequence
  Description of Artificial Sequence: Synthetic peptide
  N-term Acetic Acid
  MOD_RES (1)..(1): (R)-2-allylpyrrolidine-2-carboxylic acid
  MOD_RES (3)..(3): (S)-2-amino-4,4-dimethylpentanoic acid
  MOD_RES (4)..(4): 2-amino-2-(pent-4-en-1-yl)hept-6-enoic acid
  MOD_RES (11)..(11): (S)-3-amino-1-((pent-4-en-1-yloxy)carbonyl)pyrrolidine-3- carboxylic acid
  MOD_RES (12)..(12): (S)-2-amino-3-(thiophen-3-yl)propanoic acid
  MOD_RES (13)..(13): (S)-2-amino-3-(6-chloro-1H-indol-3-yl)propanoic acid
  C-term amino
XDXXDDAAFNXXXH

SEQ ID NO: 526 - protein, 14 aa, Artificial Sequence
  Description of Artificial Sequence: Synthetic peptide
  N-term Acetic Acid
  MOD_RES (1)..(1): (R)-2-allylpyrrolidine-2-carboxylic acid
  MOD_RES (3)..(3): (S)-2-amino-4,4-dimethylpentanoic acid
  MOD_RES (4)..(4): 2-amino-2-(pent-4-en-1-yl)hept-6-enoic acid
  MOD_RES (11)..(11): (S)-3-amino-1-((pent-4-en-1-yloxy)carbonyl)pyrrolidine-3- carboxylic acid
  MOD_RES (12)..(12): (S)-2-amino-3-(thiophen-3-yl)propanoic acid
  MOD_RES (13)..(13): 1-methyl-L-tryptophan
  C-term amino
XDXXDDAAFNXXWH

SEQ ID NO: 527 - protein, 14 aa, Artificial Sequence
  Description of Artificial Sequence: Synthetic peptide
  N-term Acetic Acid
  MOD_RES (1)..(1): (R)-2-allylpyrrolidine-2-carboxylic acid
  MOD_RES (3)..(3): (S)-2-amino-4,4-dimethylpentanoic acid
  MOD_RES (4)..(4): 2-amino-2-(pent-4-en-1-yl)hept-6-enoic acid
  MOD_RES (11)..(11): (S)-3-amino-1-((pent-4-en-1-yloxy)carbonyl)pyrrolidine-3- carboxylic acid
  MOD_RES (12)..(12): (S)-2-amino-3-(thiophen-3-yl)propanoic acid
  MOD_RES (13)..(13): (S)-2-amino-3-(5-fluoro-1H-indol-3-yl)propanoic acid
  C-term amino
XDXXDDAAFNXXXH

SEQ ID NO: 528 - protein, 14 aa, Artificial Sequence
  Description of Artificial Sequence: Synthetic peptide
  N-term Acetic Acid
  MOD_RES (1)..(1): (R)-2-allylpyrrolidine-2-carboxylic acid
  MOD_RES (3)..(3): (S)-2-amino-4,4-dimethylpentanoic acid
  MOD_RES (4)..(4): 2-amino-2-(pent-4-en-1-yl)hept-6-enoic acid
  MOD_RES (11)..(11): (S)-3-amino-1-((pent-4-en-1-yloxy)carbonyl)pyrrolidine-3- carboxylic acid
  MOD_RES (12)..(12): (S)-2-amino-3-(thiophen-3-yl)propanoic acid
  MOD_RES (13)..(13): (S)-2-amino-3-(benzo[b]thiophen-3-yl)propanoic acid
  C-term amino
XDXXDDAAFLXXXQ

SEQ ID NO: 529 - protein, 14 aa, Artificial Sequence
  Description of Artificial Sequence: Synthetic peptide
  N-term Acetic Acid
  MOD_RES (1)..(1): (R)-2-allylpyrrolidine-2-carboxylic acid
  MOD_RES (3)..(3): (S)-2-amino-4,4-dimethylpentanoic acid
  MOD_RES (4)..(4): 2-amino-2-(pent-4-en-1-yl)hept-6-enoic acid
  MOD_RES (11)..(11): (S)-3-amino-1-((pent-4-en-1-yloxy)carbonyl)pyrrolidine-3- carboxylic acid
  MOD_RES (12)..(12): (S)-2-amino-3-(thiophen-3-yl)propanoic acid
  MOD_RES (13)..(13): (S)-2-amino-3-(benzo[b]thiophen-3-yl)propanoic acid
  C-term amino
XDXXDDAAFLXXXH

SEQ ID NO: 530 - protein, 14 aa, Artificial Sequence
  Description of Artificial Sequence: Synthetic peptide
  N-term Acetic Acid
  MOD_RES (1)..(1): (R)-2-allylpyrrolidine-2-carboxylic acid
  MOD_RES (3)..(3): (S)-2-amino-4,4-dimethylpentanoic acid
  MOD_RES (4)..(4): 2-amino-2-(pent-4-en-1-yl)hept-6-enoic acid
  MOD_RES (10)..(10): L-homoserine
  MOD_RES (11)..(11): (S)-3-amino-1-((pent-4-en-1-yloxy)carbonyl)pyrrolidine-3- carboxylic acid
  MOD_RES (12)..(12): (S)-2-amino-3-(thiophen-3-yl)propanoic acid
  MOD_RES (13)..(13): (S)-2-amino-3-(benzo[b]thiophen-3-yl)propanoic acid
  C-term amino
XDXXDDAAFSXXXQ

SEQ ID NO: 531 - protein, 14 aa, Artificial Sequence
  Description of Artificial Sequence: Synthetic peptide
  N-term Acetic Acid
  MOD_RES (1)..(1): (R)-2-allylpyrrolidine-2-carboxylic acid
  MOD_RES (3)..(3): (S)-2-amino-4,4-dimethylpentanoic acid
  MOD_RES (4)..(4): 2-amino-2-(pent-4-en-1-yl)hept-6-enoic acid
  MOD_RES (10)..(10): L-homoserine
  MOD_RES (11)..(11): (S)-3-amino-1-((pent-4-en-1-yloxy)carbonyl)pyrrolidine-3- carboxylic acid
  MOD_RES (12)..(12): (S)-2-amino-3-(thiophen-3-yl)propanoic acid
  MOD_RES (13)..(13): (S)-2-amino-3-(benzo[b]thiophen-3-yl)propanoic acid
  C-term amino
XDXXDDAAFSXXXH

SEQ ID NO: 532 - protein, 14 aa, Artificial Sequence
  Description of Artificial Sequence: Synthetic peptide
  N-term Acetic Acid
  MOD_RES (1)..(1): (R)-2-allylpyrrolidine-2-carboxylic acid
  MOD_RES (3)..(3): (S)-2-amino-4,4-dimethylpentanoic acid
  MOD_RES (4)..(4): 2-amino-2-(pent-4-en-1-yl)hept-6-enoic acid
  MOD_RES (10)..(10): (S)-2-amino-5-ureidopentanoic acid
  MOD_RES (11)..(11): (S)-3-amino-1-((pent-4-en-1-yloxy)carbonyl)pyrrolidine-3- carboxylic acid
  MOD_RES (12)..(12): (S)-2-amino-3-(thiophen-3-yl)propanoic acid
  MOD_RES (13)..(13): (S)-2-amino-3-(benzo[b]thiophen-3-yl)propanoic acid
  C-term amino
XDXXDDAAFXXXXQ

SEQ ID NO: 533 - protein, 14 aa, Artificial Sequence
  Description of Artificial Sequence: Synthetic peptide
  N-term Acetic Acid
  MOD_RES (1)..(1): (R)-2-allylpyrrolidine-2-carboxylic acid
  MOD_RES (3)..(3): (S)-2-amino-4,4-dimethylpentanoic acid
  MOD_RES (4)..(4): 2-amino-2-(pent-4-en-1-yl)hept-6-enoic acid
  MOD_RES (10)..(10): (S)-2-amino-5-ureidopentanoic acid
  MOD_RES (11)..(11): (S)-3-amino-1-((pent-4-en-1-yloxy)carbonyl)pyrrolidine-3- carboxylic acid
  MOD_RES (12)..(12): (S)-2-amino-3-(thiophen-3-yl)propanoic acid
  MOD_RES (13)..(13): (S)-2-amino-3-(benzo[b]thiophen-3-yl)propanoic acid
  C-term amino
XDXXDDAAFXXXXH

SEQ ID NO: 534 - protein, 14 aa, Artificial Sequence
  Description of Artificial Sequence: Synthetic peptide
  N-term Acetic Acid
  MOD_RES (1)..(1): (R)-2-allylpyrrolidine-2-carboxylic acid
  MOD_RES (3)..(3): (S)-2-amino-4,4-dimethylpentanoic acid
  MOD_RES (4)..(4): 2-amino-2-(pent-4-en-1-yl)hept-6-enoic acid
  MOD_RES (11)..(11): (S)-3-amino-1-((pent-4-en-1-yloxy)carbonyl)pyrrolidine-3- carboxylic acid
  MOD_RES (12)..(12): (S)-2-amino-3-(thiophen-3-yl)propanoic acid
  MOD_RES (13)..(13): (S)-2-amino-3-(benzo[b]thiophen-3-yl)propanoic acid
  C-term amino
XDXXDDAAFFXXXQ

SEQ ID NO: 535 - protein, 14 aa, Artificial Sequence
  Description of Artificial Sequence: Synthetic peptide
  N-term Acetic Acid
  MOD_RES (1)..(1): (R)-2-allylpyrrolidine-2-carboxylic acid
  MOD_RES (3)..(3): (S)-2-amino-4,4-dimethylpentanoic acid
  MOD_RES (4)..(4): 2-amino-2-(pent-4-en-1-yl)hept-6-enoic acid
  MOD_RES (11)..(11): (S)-3-amino-1-((pent-4-en-1-yloxy)carbonyl)pyrrolidine-3- carboxylic acid
  MOD_RES (12)..(12): (S)-2-amino-3-(thiophen-3-yl)propanoic acid
  MOD_RES (13)..(13): (S)-2-amino-3-(benzo[b]thiophen-3-yl)propanoic acid
  C-term amino
XDXXDDAAFFXXXH

SEQ ID NO: 536 - protein, 14 aa, Artificial Sequence
  Description of Artificial Sequence: Synthetic peptide
  N-term Acetic Acid
  MOD_RES (1)..(1): (R)-2-allylpyrrolidine-2-carboxylic acid
  MOD_RES (3)..(3): (S)-2-amino-4,4-dimethylpentanoic acid
  MOD_RES (4)..(4): 2-amino-2-(pent-4-en-1-yl)hept-6-enoic acid
  MOD_RES (11)..(11): (S)-3-amino-1-((pent-4-en-1-yloxy)carbonyl)pyrrolidine-3- carboxylic acid
  MOD_RES (12)..(12): (S)-2-amino-3-(thiophen-3-yl)propanoic acid
  MOD_RES (13)..(13): (S)-2-amino-3-(benzo[b]thiophen-3-yl)propanoic acid
  C-term amino
XDXXDDAAFTXXXQ

SEQ ID NO: 537 - protein, 14 aa, Artificial Sequence
  Description of Artificial Sequence: Synthetic peptide
  N-term Acetic Acid
  MOD_RES (1)..(1): (R)-2-allylpyrrolidine-2-carboxylic acid
  MOD_RES (3)..(3): (S)-2-amino-4,4-dimethylpentanoic acid
  MOD_RES (4)..(4): 2-amino-2-(pent-4-en-1-yl)hept-6-enoic acid
  MOD_RES (11)..(11): (S)-3-amino-1-((pent-4-en-1-yloxy)carbonyl)pyrrolidine-3- carboxylic acid
  MOD_RES (12)..(12): (S)-2-amino-3-(thiophen-3-yl)propanoic acid
  MOD_RES (13)..(13): (S)-2-amino-3-(benzo[b]thiophen-3-yl)propanoic acid
  C-term amino
XDXXDDAAFTXXXH

SEQ ID NO: 538 - protein, 14 aa, Artificial Sequence
  Description of Artificial Sequence: Synthetic peptide
  N-term Acetic Acid
  MOD_RES (1)..(1): (R)-2-allylpyrrolidine-2-carboxylic acid
  MOD_RES (3)..(3): (S)-2-amino-4,4-dimethylpentanoic acid
  MOD_RES (4)..(4): 2-amino-2-(pent-4-en-1-yl)hept-6-enoic acid
  MOD_RES (11)..(11): (S)-3-amino-1-((pent-4-en-1-yloxy)carbonyl)pyrrolidine-3- carboxylic acid
  MOD_RES (12)..(12): (S)-2-amino-3-(thiazol-4-yl)propanoic acid
  MOD_RES (13)..(13): (S)-2-amino-3-(benzo[b]thiophen-3-yl)propanoic acid
  C-term amino
XDXXDDAAFNXXXQ

SEQ ID NO: 539 - protein, 14 aa, Artificial Sequence
  Description of Artificial Sequence: Synthetic peptide
  N-term Acetic Acid
  MOD_RES (1)..(1): (R)-2-allylpyrrolidine-2-carboxylic acid
  MOD_RES (3)..(3): (S)-2-amino-4,4-dimethylpentanoic acid
  MOD_RES (4)..(4): 2-amino-2-(pent-4-en-1-yl)hept-6-enoic acid
  MOD_RES (9)..(9): (S)-2-amino-3-(thiazol-4-yl)propanoic acid
  MOD_RES (11)..(11): (S)-3-amino-1-((pent-4-en-1-yloxy)carbonyl)pyrrolidine-3- carboxylic acid
  MOD_RES (12)..(12): (S)-2-amino-3-(thiophen-3-yl)propanoic acid
  MOD_RES (13)..(13): (S)-2-amino-3-(benzo[b]thiophen-3-yl)propanoic acid
  C-term amino
XDXXDDAAXNXXXQ

SEQ ID NO: 540 - protein, 14 aa, Artificial Sequence
  Description of Artificial Sequence: Synthetic peptide
  N-term Acetic Acid
  MOD_RES (1)..(1): (R)-2-allylpyrrolidine-2-carboxylic acid
  MOD_RES (3)..(3): (S)-2-amino-4,4-dimethylpentanoic acid
  MOD_RES (4)..(4): 2-amino-2-(pent-4-en-1-yl)hept-6-enoic acid
  MOD_RES (11)..(11): (S)-3-amino-1-((pent-4-en-1-yloxy)carbonyl)pyrrolidine-3- carboxylic acid
  MOD_RES (12)..(12): (S)-2-amino-3-(thiophen-3-yl)propanoic acid
  MOD_RES (13)..(13): (S)-2-amino-3-(benzo[b]thiophen-3-yl)propanoic acid
  MOD_RES (14)..(14): D-histidine
  C-term amino
XDXXDDAAFNXXXH

SEQ ID NO: 541 - protein, 14 aa, Artificial Sequence
  Description of Artificial Sequence: Synthetic peptide
  N-term Acetic Acid
  MOD_RES (1)..(1): (R)-2-allylpyrrolidine-2-carboxylic acid
  MOD_RES (3)..(3): (S)-2-amino-4,4-dimethylpentanoic acid
  MOD_RES (4)..(4): 2-amino-2-(pent-4-en-1-yl)hept-6-enoic acid
  MOD_RES (11)..(11): (S)-3-amino-1-((pent-4-en-1-yloxy)carbonyl)pyrrolidine-3- carboxylic acid
  MOD_RES (12)..(12): (S)-2-amino-3-(thiophen-3-yl)propanoic acid
  MOD_RES (13)..(13): (S)-2-amino-3-(benzo[b]thiophen-3-yl)propanoic acid
  C-term amino
XDXXDDAAFNXXXT

SEQ ID NO: 542 - protein, 14 aa, Artificial Sequence
  Description of Artificial Sequence: Synthetic peptide
  N-term Acetic Acid
  MOD_RES (1)..(1): (R)-2-allylpyrrolidine-2-carboxylic acid
  MOD_RES (3)..(3): (S)-2-amino-4,4-dimethylpentanoic acid
  MOD_RES (4)..(4): 2-amino-2-(pent-4-en-1-yl)hept-6-enoic acid
  MOD_RES (11)..(11): (S)-3-amino-1-((pent-4-en-1-yloxy)carbonyl)pyrrolidine-3- carboxylic acid
  MOD_RES (12)..(12): (S)-2-amino-3-(thiophen-3-yl)propanoic acid
  MOD_RES (13)..(13): (S)-2-amino-3-(benzo[b]thiophen-3-yl)propanoic acid
  C-term amino
XDXXDDAAFNXXXS

SEQ ID NO: 543 - protein, 14 aa, Artificial Sequence
  Description of Artificial Sequence: Synthetic peptide
  N-term Acetic Acid
  MOD_RES (1)..(1): (R)-2-allylpyrrolidine-2-carboxylic acid
  MOD_RES (3)..(3): (S)-2-amino-4,4-dimethylpentanoic acid
  MOD_RES (4)..(4): 2-amino-2-(pent-4-en-1-yl)hept-6-enoic acid
  MOD_RES (11)..(11): (S)-3-amino-1-((pent-4-en-1-yloxy)carbonyl)pyrrolidine-3- carboxylic acid
  MOD_RES (12)..(12): (S)-2-amino-3-(thiophen-3-yl)propanoic acid
  MOD_RES (13)..(13): (S)-2-amino-3-(benzo[b]thiophen-3-yl)propanoic acid
  C-term amino
XDXXDDAAFNXXXN

SEQ ID NO: 544 - protein, 14 aa, Artificial Sequence
  Description of Artificial Sequence: Synthetic peptide
  N-term Acetic Acid
  MOD_RES (1)..(1): (R)-2-allylpyrrolidine-2-carboxylic acid
  MOD_RES (3)..(3): (S)-2-amino-4,4-dimethylpentanoic acid
  MOD_RES (4)..(4): 2-amino-2-(pent-4-en-1-yl)hept-6-enoic acid
  MOD_RES (11)..(11): (S)-3-amino-1-((pent-4-en-1-yloxy)carbonyl)pyrrolidine-3- carboxylic acid
  MOD_RES (12)..(12): (S)-2-amino-3-(thiophen-3-yl)propanoic acid
  MOD_RES (13)..(13): (S)-2-amino-3-(benzo[b]thiophen-3-yl)propanoic acid
  MOD_RES (14)..(14): D-threonine
  C-term amino
XDXXDDAAFNXXXT

SEQ ID NO: 545 - protein, 14 aa, Artificial Sequence
  Description of Artificial Sequence: Synthetic peptide
  N-term Acetic Acid
  MOD_RES (1)..(1): (R)-2-allylpyrrolidine-2-carboxylic acid
  MOD_RES (3)..(3): (S)-2-amino-4,4-dimethylpentanoic acid
  MOD_RES (4)..(4): 2-amino-2-(pent-4-en-1-yl)hept-6-enoic acid
  MOD_RES (11)..(11): (S)-3-amino-1-((pent-4-en-1-yloxy)carbonyl)pyrrolidine-3- carboxylic acid
  MOD_RES (12)..(12): (S)-2-amino-3-(thiophen-3-yl)propanoic acid
  MOD_RES (13)..(13): (S)-2-amino-3-(benzo[b]thiophen-3-yl)propanoic acid
  MOD_RES (14)..(14): D-asparagine
  C-term amino
XDXXDDAAFNXXXN

SEQ ID NO: 546 - protein, 15 aa, Artificial Sequence
  Description of Artificial Sequence: Synthetic peptide
  N-term Acetic Acid
  MOD_RES (1)..(1): (R)-2-allylpyrrolidine-2-carboxylic acid
  MOD_RES (3)..(3): (S)-2-amino-4,4-dimethylpentanoic acid
  MOD_RES (4)..(4): 2-amino-2-(pent-4-en-1-yl)hept-6-enoic acid
  MOD_RES (11)..(11): (S)-3-amino-1-((pent-4-en-1-yloxy)carbonyl)pyrrolidine-3- carboxylic acid
  MOD_RES (12)..(12): (S)-2-amino-3-(thiophen-3-yl)propanoic acid
  MOD_RES (13)..(13): (S)-2-amino-3-(benzo[b]thiophen-3-yl)propanoic acid
  C-term amino
XDXXDDAAFNXXXQA

SEQ ID NO: 547 - protein, 15 aa, Artificial Sequence
  Description of Artificial Sequence: Synthetic peptide
  N-term Acetic Acid
  MOD_RES (1)..(1): (R)-2-allylpyrrolidine-2-carboxylic acid
  MOD_RES (3)..(3): (S)-2-amino-4,4-dimethylpentanoic acid
  MOD_RES (4)..(4): 2-amino-2-(pent-4-en-1-yl)hept-6-enoic acid
  MOD_RES (11)..(11): (S)-3-amino-1-((pent-4-en-1-yloxy)carbonyl)pyrrolidine-3- carboxylic acid
  MOD_RES (12)..(12): (S)-2-amino-3-(thiophen-3-yl)propanoic acid
  MOD_RES (13)..(13): (S)-2-amino-3-(benzo[b]thiophen-3-yl)propanoic acid
  C-term amino
XDXXDDAAFNXXXHA

SEQ ID NO: 548 - protein, 15 aa, Artificial Sequence
  Description of Artificial Sequence: Synthetic peptide
  N-term Acetic Acid
  MOD_RES (1)..(1): (R)-2-allylpyrrolidine-2-carboxylic acid
  MOD_RES (3)..(3): (S)-2-amino-4,4-dimethylpentanoic acid
  MOD_RES (4)..(4): 2-amino-2-(pent-4-en-1-yl)hept-6-enoic acid
  MOD_RES (11)..(11): (S)-3-amino-1-((pent-4-en-1-yloxy)carbonyl)pyrrolidine-3- carboxylic acid
  MOD_RES (12)..(12): (S)-2-amino-3-(thiophen-3-yl)propanoic acid
  MOD_RES (13)..(13): (S)-2-amino-3-(benzo[b]thiophen-3-yl)propanoic acid
  C-term amino
XDXXDDAAFNXXXNA

SEQ ID NO: 549 - protein, 15 aa, Artificial Sequence
  Description of Artificial Sequence: Synthetic peptide
  N-term Acetic Acid
  MOD_RES (1)..(1): (R)-2-allylpyrrolidine-2-carboxylic acid
  MOD_RES (3)..(3): (S)-2-amino-4,4-dimethylpentanoic acid
  MOD_RES (4)..(4): 2-amino-2-(pent-4-en-1-yl)hept-6-enoic acid
  MOD_RES (11)..(11): (S)-3-amino-1-((pent-4-en-1-yloxy)carbonyl)pyrrolidine-3- carboxylic acid
  MOD_RES (12)..(12): (S)-2-amino-3-(thiophen-3-yl)propanoic acid
  MOD_RES (13)..(13): (S)-2-amino-3-(benzo[b]thiophen-3-yl)propanoic acid
  MOD_RES (15)..(15): D-alanine
  C-term amino
XDXXDDAAFNXXXQA

SEQ ID NO: 550 - protein, 15 aa, Artificial Sequence
  Description of Artificial Sequence: Synthetic peptide
  N-term Acetic Acid
  MOD_RES (1)..(1): (R)-2-allylpyrrolidine-2-carboxylic acid
  MOD_RES (3)..(3): (S)-2-amino-4,4-dimethylpentanoic acid
  MOD_RES (4)..(4): 2-amino-2-(pent-4-en-1-yl)hept-6-enoic acid
  MOD_RES (11)..(11): (S)-3-amino-1-((pent-4-en-1-yloxy)carbonyl)pyrrolidine-3- carboxylic acid
  MOD_RES (12)..(12): (S)-2-amino-3-(thiophen-3-yl)propanoic acid
  MOD_RES (13)..(13): (S)-2-amino-3-(benzo[b]thiophen-3-yl)propanoic acid
  MOD_RES (15)..(15): D-alanine
  C-term amino
XDXXDDAAFNXXXHA

SEQ ID NO: 551 - protein, 15 aa, Artificial Sequence
  Description of Artificial Sequence: Synthetic peptide
  N-term Acetic Acid
  MOD_RES (1)..(1): (R)-2-allylpyrrolidine-2-carboxylic acid
  MOD_RES (3)..(3): (S)-2-amino-4,4-dimethylpentanoic acid
  MOD_RES (4)..(4): 2-amino-2-(pent-4-en-1-yl)hept-6-enoic acid
  MOD_RES (11)..(11): (S)-3-amino-1-((pent-4-en-1-yloxy)carbonyl)pyrrolidine-3- carboxylic acid
  MOD_RES (12)..(12): (S)-2-amino-3-(thiophen-3-yl)propanoic acid
  MOD_RES (13)..(13): (S)-2-amino-3-(benzo[b]thiophen-3-yl)propanoic acid
  MOD_RES (15)..(15): D-alanine
  C-term amino
XDXXDDAAFNXXXNA

SEQ ID NO: 552 - protein, 15 aa, Artificial Sequence
  Description of Artificial Sequence: Synthetic peptide
  N-term Acetic Acid
  MOD_RES (1)..(1): (R)-2-allylpyrrolidine-2-carboxylic acid
  MOD_RES (3)..(3): (S)-2-amino-4,4-dimethylpentanoic acid
  MOD_RES (4)..(4): 2-amino-2-(pent-4-en-1-yl)hept-6-enoic acid
  MOD_RES (11)..(11): (S)-3-amino-1-((hex-5-en-1-yloxy)carbonyl)pyrrolidine-3- carboxylic acid
  MOD_RES (12)..(12): (S)-2-amino-3-(thiophen-3-yl)propanoic acid
  MOD_RES (13)..(13): (S)-2-amino-3-(benzo[b]thiophen-3-yl)propanoic acid
  C-term amino
XDXXDDAAFNXXXQA

SEQ ID NO: 553 - protein, 15 aa, Artificial Sequence
  Description of Artificial Sequence: Synthetic peptide
  N-term Acetic Acid
  MOD_RES (1)..(1): (R)-2-allylpyrrolidine-2-carboxylic acid
  MOD_RES (3)..(3): (S)-2-amino-4,4-dimethylpentanoic acid
  MOD_RES (4)..(4): 2-amino-2-(pent-4-en-1-yl)hept-6-enoic acid
  MOD_RES (11)..(11): (S)-3-amino-1-((hex-5-en-1-yloxy)carbonyl)pyrrolidine-3- carboxylic acid
  MOD_RES (12)..(12): (S)-2-amino-3-(thiophen-3-yl)propanoic acid
  MOD_RES (13)..(13): (S)-2-amino-3-(benzo[b]thiophen-3-yl)propanoic acid
  C-term amino
XDXXDDAAFNXXXHA

SEQ ID NO: 554 - protein, 15 aa, Artificial Sequence
  Description of Artificial Sequence: Synthetic peptide
  N-term Acetic Acid
  MOD_RES (1)..(1): (R)-2-allylpyrrolidine-2-carboxylic acid
  MOD_RES (3)..(3): (S)-2-amino-4,4-dimethylpentanoic acid
  MOD_RES (4)..(4): 2-amino-2-(pent-4-en-1-yl)hept-6-enoic acid
  MOD_RES (11)..(11): (S)-3-amino-1-((hex-5-en-1-yloxy)carbonyl)pyrrolidine-3- carboxylic acid
  MOD_RES (12)..(12): (S)-2-amino-3-(thiophen-3-yl)propanoic acid
  MOD_RES (13)..(13): (S)-2-amino-3-(benzo[b]thiophen-3-yl)propanoic acid
  C-term amino
XDXXDDAAFNXXXNA

SEQ ID NO: 555 - protein, 15 aa, Artificial Sequence
  Description of Artificial Sequence: Synthetic peptide
  N-term Acetic Acid
  MOD_RES (1)..(1): (R)-2-allylpyrrolidine-2-carboxylic acid
  MOD_RES (3)..(3): (S)-2-amino-4,4-dimethylpentanoic acid
  MOD_RES (4)..(4): 2-amino-2-(pent-4-en-1-yl)hept-6-enoic acid
  MOD_RES (11)..(11): (S)-3-amino-1-((hex-5-en-1-yloxy)carbonyl)pyrrolidine-3- carboxylic acid
  MOD_RES (12)..(12): (S)-2-amino-3-(thiophen-3-yl)propanoic acid
  MOD_RES (13)..(13): (S)-2-amino-3-(benzo[b]thiophen-3-yl)propanoic acid
  MOD_RES (15)..(15): D-alanine
  C-term amino
XDXXDDAAFNXXXQA

SEQ ID NO: 556 - protein, 15 aa, Artificial Sequence
  Description of Artificial Sequence: Synthetic peptide
  N-term Acetic Acid
  MOD_RES (1)..(1): (R)-2-allylpyrrolidine-2-carboxylic acid
  MOD_RES (3)..(3): (S)-2-amino-4,4-dimethylpentanoic acid
  MOD_RES (4)..(4): 2-amino-2-(pent-4-en-1-yl)hept-6-enoic acid
  MOD_RES (11)..(11): (S)-3-amino-1-((hex-5-en-1-yloxy)carbonyl)pyrrolidine-3- carboxylic acid
  MOD_RES (12)..(12): (S)-2-amino-3-(thiophen-3-yl)propanoic acid
  MOD_RES (13)..(13): (S)-2-amino-3-(benzo[b]thiophen-3-yl)propanoic acid
  MOD_RES (15)..(15): D-alanine
  C-term amino
XDXXDDAAFNXXXHA

SEQ ID NO: 557 - protein, 15 aa, Artificial Sequence
  Description of Artificial Sequence: Synthetic peptide
  N-term Acetic Acid
  MOD_RES (1)..(1): (R)-2-allylpyrrolidine-2-carboxylic acid
  MOD_RES (3)..(3): (S)-2-amino-4,4-dimethylpentanoic acid
  MOD_RES (4)..(4): 2-amino-2-(pent-4-en-1-yl)hept-6-enoic acid
  MOD_RES (11)..(11): (S)-3-amino-1-((hex-5-en-1-yloxy)carbonyl)pyrrolidine-3- carboxylic acid
  MOD_RES (12)..(12): (S)-2-amino-3-(thiophen-3-yl)propanoic acid
  MOD_RES (13)..(13): (S)-2-amino-3-(benzo[b]thiophen-3-yl)propanoic acid
  MOD_RES (15)..(15): D-alanine
  C-term amino
XDXXDDAAFNXXXNA

SEQ ID NO: 558 - protein, 14 aa, Artificial Sequence
  Description of Artificial Sequence: Synthetic peptide
  N-term Acetic Acid
  MOD_RES (1)..(1): (R)-2-allylpyrrolidine-2-carboxylic acid
  MOD_RES (3)..(3): (S)-2-amino-4,4-dimethylpentanoic acid
  MOD_RES (4)..(4): 2-amino-2-(pent-4-en-1-yl)hept-6-enoic acid
  MOD_RES (11)..(11): (S)-3-amino-1-((pent-4-en-1-yloxy)carbonyl)pyrrolidine-3- carboxylic acid
  MOD_RES (12)..(12): (S)-2-amino-3-(thiophen-3-yl)propanoic acid
  MOD_RES (13)..(13): (S)-2-amino-3-(benzo[b]thiophen-3-yl)propanoic acid
  C-term amino
XDXXDNAAFNXXXQ

SEQ ID NO: 559 - protein, 14 aa, Artificial Sequence
  Description of Artificial Sequence: Synthetic peptide
  N-term Acetic Acid
  MOD_RES (1)..(1): (R)-2-allylpyrrolidine-2-carboxylic acid
  MOD_RES (3)..(3): (S)-2-amino-4,4-dimethylpentanoic acid
  MOD_RES (4)..(4): 2-amino-2-(pent-4-en-1-yl)hept-6-enoic acid
  MOD_RES (11)..(11): (S)-3-amino-1-((pent-4-en-1-yloxy)carbonyl)pyrrolidine-3- carboxylic acid
  MOD_RES (12)..(12): (S)-2-amino-3-(thiophen-3-yl)propanoic acid
  MOD_RES (13)..(13): (S)-2-amino-3-(benzo[b]thiophen-3-yl)propanoic acid
  C-term amino
XDXXDNAAFNXXXH

SEQ ID NO: 560 - protein, 14 aa, Artificial Sequence
  Description of Artificial Sequence: Synthetic peptide
  N-term Acetic Acid
  MOD_RES (1)..(1): (R)-2-allylpyrrolidine-2-carboxylic acid
  MOD_RES (3)..(3): (S)-2-amino-4,4-dimethylpentanoic acid
  MOD_RES (4)..(4): 2-amino-2-(pent-4-en-1-yl)hept-6-enoic acid
  MOD_RES (11)..(11): (S)-3-amino-1-((pent-4-en-1-yloxy)carbonyl)pyrrolidine-3- carboxylic acid
  MOD_RES (12)..(12): (S)-2-amino-3-(thiophen-3-yl)propanoic acid
  MOD_RES (13)..(13): (S)-2-amino-3-(benzo[b]thiophen-3-yl)propanoic acid
  C-term amino
XDXXDQAAFNXXXQ

SEQ ID NO: 561 - protein, 14 aa, Artificial Sequence
  Description of Artificial Sequence: Synthetic peptide
  N-term Acetic Acid
  MOD_RES (1)..(1): (R)-2-allylpyrrolidine-2-carboxylic acid
  MOD_RES (3)..(3): (S)-2-amino-4,4-dimethylpentanoic acid
  MOD_RES (4)..(4): 2-amino-2-(pent-4-en-1-yl)hept-6-enoic acid
  MOD_RES (11)..(11): (S)-3-amino-1-((pent-4-en-1-yloxy)carbonyl)pyrrolidine-3- carboxylic acid
  MOD_RES (12)..(12): (S)-2-amino-3-(thiophen-3-yl)propanoic acid
  MOD_RES (13)..(13): (S)-2-amino-3-(benzo[b]thiophen-3-yl)propanoic acid
  C-term amino
XDXXDQAAFNXXXH

SEQ ID NO: 562 - protein, 14 aa, Artificial Sequence
  Description of Artificial Sequence: Synthetic peptide
  N-term Acetic Acid
  MOD_RES (1)..(1): (R)-2-allylpyrrolidine-2-carboxylic acid
  MOD_RES (3)..(3): (S)-2-amino-4,4-dimethylpentanoic acid
  MOD_RES (4)..(4): 2-amino-2-(pent-4-en-1-yl)hept-6-enoic acid
  MOD_RES (6)..(6): (S)-2-amino-5-ureidopentanoic acid
  MOD_RES (11)..(11): (S)-3-amino-1-((pent-4-en-1-yloxy)carbonyl)pyrrolidine-3- carboxylic acid
  MOD_RES (12)..(12): (S)-2-amino-3-(thiophen-3-yl)propanoic acid
  MOD_RES (13)..(13): (S)-2-amino-3-(benzo[b]thiophen-3-yl)propanoic acid
  C-term amino
XDXXDXAAFNXXXQ

SEQ ID NO: 563 - protein, 14 aa, Artificial Sequence
  Description of Artificial Sequence: Synthetic peptide
  N-term Acetic Acid
  MOD_RES (1)..(1): (R)-2-allylpyrrolidine-2-carboxylic acid
  MOD_RES (3)..(3): (S)-2-amino-4,4-dimethylpentanoic acid
  MOD_RES (4)..(4): 2-amino-2-(pent-4-en-1-yl)hept-6-enoic acid
  MOD_RES (6)..(6): (S)-2-amino-5-ureidopentanoic acid
  MOD_RES (11)..(11): (S)-3-amino-1-((pent-4-en-1-yloxy)carbonyl)pyrrolidine-3- carboxylic acid
  MOD_RES (12)..(12): (S)-2-amino-3-(thiophen-3-yl)propanoic acid
  MOD_RES (13)..(13): (S)-2-amino-3-(benzo[b]thiophen-3-yl)propanoic acid
  C-term amino
XDXXDXAAFNXXXH

SEQ ID NO: 564 - protein, 14 aa, Artificial Sequence
  Description of Artificial Sequence: Synthetic peptide
  N-term Acetic Acid
  MOD_RES (1)..(1): (R)-2-allylpyrrolidine-2-carboxylic acid
  MOD_RES (3)..(3): (S)-2-amino-4,4-dimethylpentanoic acid
  MOD_RES (4)..(4): 2-amino-2-(pent-4-en-1-yl)hept-6-enoic acid
  MOD_RES (11)..(11): (S)-3-amino-1-((pent-4-en-1-yloxy)carbonyl)pyrrolidine-3- carboxylic acid
  MOD_RES (12)..(12): (S)-2-amino-3-(thiophen-3-yl)propanoic acid
  MOD_RES (13)..(13): (S)-2-amino-3-(benzo[b]thiophen-3-yl)propanoic acid
  C-term amino
XDXXDYAAFNXXXQ

SEQ ID NO: 565 - protein, 14 aa, Artificial Sequence
  Description of Artificial Sequence: Synthetic peptide
  N-term Acetic Acid
  MOD_RES (1)..(1): (R)-2-allylpyrrolidine-2-carboxylic acid
  MOD_RES (3)..(3): (S)-2-amino-4,4-dimethylpentanoic acid
  MOD_RES (4)..(4): 2-amino-2-(pent-4-en-1-yl)hept-6-enoic acid
  MOD_RES (11)..(11): (S)-3-amino-1-((pent-4-en-1-yloxy)carbonyl)pyrrolidine-3- carboxylic acid
  MOD_RES (12)..(12): (S)-2-amino-3-(thiophen-3-yl)propanoic acid
  MOD_RES (13)..(13): (S)-2-amino-3-(benzo[b]thiophen-3-yl)propanoic acid
  C-term amino
XDXXDYAAFNXXXH

SEQ ID NO: 566 - protein, 14 aa, Artificial Sequence
  Description of Artificial Sequence: Synthetic peptide
  N-term Acetic Acid
  MOD_RES (1)..(1): (R)-2-allylpyrrolidine-2-carboxylic acid
  MOD_RES (3)..(3): (S)-2-amino-4,4-dimethylpentanoic acid
  MOD_RES (4)..(4): 2-amino-2-(pent-4-en-1-yl)hept-6-enoic acid
  MOD_RES (11)..(11): (S)-3-amino-1-((pent-4-en-1-yloxy)carbonyl)pyrrolidine-3- carboxylic acid
  MOD_RES (12)..(12): (S)-2-amino-3-(thiophen-3-yl)propanoic acid
  MOD_RES (13)..(13): (S)-2-amino-3-(benzo[b]thiophen-3-yl)propanoic acid
  C-term amino
XDXXDTAAFNXXXQ

SEQ ID NO: 567 - protein, 14 aa, Artificial Sequence
  Description of Artificial Sequence: Synthetic peptide
  N-term Acetic Acid
  MOD_RES (1)..(1): (R)-2-allylpyrrolidine-2-carboxylic acid
  MOD_RES (3)..(3): (S)-2-amino-4,4-dimethylpentanoic acid
  MOD_RES (4)..(4): 2-amino-2-(pent-4-en-1-yl)hept-6-enoic acid
  MOD_RES (11)..(11): (S)-3-amino-1-((pent-4-en-1-yloxy)carbonyl)pyrrolidine-3- carboxylic acid
  MOD_RES (12)..(12): (S)-2-amino-3-(thiophen-3-yl)propanoic acid
  MOD_RES (13)..(13): (S)-2-amino-3-(benzo[b]thiophen-3-yl)propanoic acid
  C-term amino
XDXXDTAAFNXXXH

SEQ ID NO: 568 - protein, 14 aa, Artificial Sequence
  Description of Artificial Sequence: Synthetic peptide
  N-term Acetic Acid
  MOD_RES (1)..(1): (R)-2-allylpyrrolidine-2-carboxylic acid
  MOD_RES (3)..(3): (S)-2-amino-4,4-dimethylpentanoic acid
  MOD_RES (4)..(4): 2-amino-2-(pent-4-en-1-yl)hept-6-enoic acid
  MOD_RES (11)..(11): (S)-3-amino-1-((pent-4-en-1-yloxy)carbonyl)pyrrolidine-3- carboxylic acid
  MOD_RES (12)..(12): (S)-2-amino-3-(thiophen-3-yl)propanoic acid
  MOD_RES (13)..(13): (S)-2-amino-3-(benzo[b]thiophen-3-yl)propanoic acid
  C-term amino
XDXXDLAAFNXXXQ

SEQ ID NO: 569 - protein, 14 aa, Artificial Sequence
  Description of Artificial Sequence: Synthetic peptide
  N-term Acetic Acid
  MOD_RES (1)..(1): (R)-2-allylpyrrolidine-2-carboxylic acid
  MOD_RES (3)..(3): (S)-2-amino-4,4-dimethylpentanoic acid
  MOD_RES (4)..(4): 2-amino-2-(pent-4-en-1-yl)hept-6-enoic acid
  MOD_RES (11)..(11): (S)-3-amino-1-((pent-4-en-1-yloxy)carbonyl)pyrrolidine-3- carboxylic acid
  MOD_RES (12)..(12): (S)-2-amino-3-(thiophen-3-yl)propanoic acid
  MOD_RES (13)..(13): (S)-2-amino-3-(benzo[b]thiophen-3-yl)propanoic acid
  C-term amino
XDXXDLAAFNXXXH

SEQ ID NO: 570 - protein, 14 aa, Artificial Sequence
  Description of Artificial Sequence: Synthetic peptide
  N-term Acetic Acid
  MOD_RES (1)..(1): (R)-2-allylpyrrolidine-2-carboxylic acid
  MOD_RES (3)..(3): (S)-2-amino-4,4-dimethylpentanoic acid
  MOD_RES (4)..(4): 2-amino-2-(pent-4-en-1-yl)hept-6-enoic acid
  MOD_RES (6)..(6): (S)-2-amino-3-((carboxymethyl)(2,2,2-trifluoroethyl)amino) propanoic acid
  MOD_RES (11)..(11): (S)-3-amino-1-((pent-4-en-1-yloxy)carbonyl)pyrrolidine-3- carboxylic acid
  MOD_RES (12)..(12): (S)-2-amino-3-(thiophen-3-yl)propanoic acid
  MOD_RES (13)..(13): (S)-2-amino-3-(benzo[b]thiophen-3-yl)propanoic acid
  C-term amino
XDXXDXAAFFXXXQ

SEQ ID NO: 571 - protein, 14 aa, Artificial Sequence
  Description of Artificial Sequence: Synthetic peptide
  N-term Acetic Acid
  MOD_RES (1)..(1): (R)-2-allylpyrrolidine-2-carboxylic acid
  MOD_RES (3)..(3): (S)-2-amino-4,4-dimethylpentanoic acid
  MOD_RES (4)..(4): 2-amino-2-(pent-4-en-1-yl)hept-6-enoic acid
  MOD_RES (6)..(6): (S)-2-amino-3-((carboxymethyl)(2,2,2-trifluoroethyl)amino) propanoic acid
  MOD_RES (11)..(11): (S)-3-amino-1-((pent-4-en-1-yloxy)carbonyl)pyrrolidine-3- carboxylic acid
  MOD_RES (12)..(12): (S)-2-amino-3-(thiophen-3-yl)propanoic acid
  MOD_RES (13)..(13): (S)-2-amino-3-(benzo[b]thiophen-3-yl)propanoic acid
  C-term amino
XDXXDXAAFLXXXQ

SEQ ID NO: 572 - protein, 14 aa, Artificial Sequence
  Description of Artificial Sequence: Synthetic peptide
  N-term Acetic Acid
  MOD_RES (1)..(1): (R)-2-allylpyrrolidine-2-carboxylic acid
  MOD_RES (3)..(3): (S)-2-amino-4,4-dimethylpentanoic acid
  MOD_RES (4)..(4): 2-amino-2-(pent-4-en-1-yl)hept-6-enoic acid
  MOD_RES (6)..(6): (S)-4-(2-amino-2-carboxyethyl)benzoic acid
  MOD_RES (11)..(11): (S)-3-amino-1-((pent-4-en-1-yloxy)carbonyl)pyrrolidine-3- carboxylic acid
  MOD_RES (12)..(12): (S)-2-amino-3-(thiophen-3-yl)propanoic acid
  MOD_RES (13)..(13): (S)-2-amino-3-(benzo[b]thiophen-3-yl)propanoic acid
  C-term amino
XDXXDXAAFFXXXQ

SEQ ID NO: 573 - protein, 14 aa, Artificial Sequence
  Description of Artificial Sequence: Synthetic peptide
  N-term Acetic Acid
  MOD_RES (1)..(1): (R)-2-allylpyrrolidine-2-carboxylic acid
  MOD_RES (3)..(3): (S)-2-amino-4,4-dimethylpentanoic acid
  MOD_RES (4)..(4): 2-amino-2-(pent-4-en-1-yl)hept-6-enoic acid
  MOD_RES (6)..(6): (S)-4-(2-amino-2-carboxyethyl)benzoic acid
  MOD_RES (11)..(11): (S)-3-amino-1-((pent-4-en-1-yloxy)carbonyl)pyrrolidine-3- carboxylic acid
  MOD_RES (12)..(12): (S)-2-amino-3-(thiophen-3-yl)propanoic acid
  MOD_RES (13)..(13): (S)-2-amino-3-(benzo[b]thiophen-3-yl)propanoic acid
  C-term amino
XDXXDXAAFLXXXQ

SEQ ID NO: 574 - protein, 14 aa, Artificial Sequence
  Description of Artificial Sequence: Synthetic peptide
  N-term Acetic Acid
  MOD_RES (1)..(1): (R)-2-allylpyrrolidine-2-carboxylic acid
  MOD_RES (3)..(3): (S)-2-amino-4,4-dimethylpentanoic acid
  MOD_RES (4)..(4): 2-amino-2-(pent-4-en-1-yl)hept-6-enoic acid
  MOD_RES (6)..(6): (S)-3-(2-amino-2-carboxyethyl)benzoic acid
  MOD_RES (11)..(11): (S)-3-amino-1-((pent-4-en-1-yloxy)carbonyl)pyrrolidine-3- carboxylic acid
  MOD_RES (12)..(12): (S)-2-amino-3-(thiophen-3-yl)propanoic acid
  MOD_RES (13)..(13): (S)-2-amino-3-(benzo[b]thiophen-3-yl)propanoic acid
  C-term amino
XDXXDXAAFFXXXQ

SEQ ID NO: 575 - protein, 14 aa, Artificial Sequence
  Description of Artificial Sequence: Synthetic peptide
  N-term Acetic Acid
  MOD_RES (1)..(1): (R)-2-allylpyrrolidine-2-carboxylic acid
  MOD_RES (3)..(3): (S)-2-amino-4,4-dimethylpentanoic acid
  MOD_RES (4)..(4): 2-amino-2-(pent-4-en-1-yl)hept-6-enoic acid
  MOD_RES (6)..(6): (S)-2-(2-amino-2-carboxyethyl)benzoic acid
  MOD_RES (11)..(11): (S)-3-amino-1-((pent-4-en-1-yloxy)carbonyl)pyrrolidine-3- carboxylic acid
  MOD_RES (12)..(12): (S)-2-amino-3-(thiophen-3-yl)propanoic acid
  MOD_RES (13)..(13): (S)-2-amino-3-(benzo[b]thiophen-3-yl)propanoic acid
  C-term amino
XDXXDXAAFFXXXQ

SEQ ID NO: 576 - protein, 14 aa, Artificial Sequence
  Description of Artificial Sequence: Synthetic peptide
  N-term Acetic Acid
  MOD_RES (1)..(1): (R)-2-allylpyrrolidine-2-carboxylic acid
  MOD_RES (3)..(3): (S)-2-amino-4,4-dimethylpentanoic acid
  MOD_RES (4)..(4): 2-amino-2-(pent-4-en-1-yl)hept-6-enoic acid
  MOD_RES (6)..(6): (S)-2-(2-amino-2-carboxyethyl)benzoic acid
  MOD_RES (11)..(11): (S)-3-amino-1-((pent-4-en-1-yloxy)carbonyl)pyrrolidine-3- carboxylic acid
  MOD_RES (12)..(12): (S)-2-amino-3-(thiophen-3-yl)propanoic acid
  MOD_RES (13)..(13): (S)-2-amino-3-(benzo[b]thiophen-3-yl)propanoic acid
  C-term amino
XDXXDXAAFLXXXQ

SEQ ID NO: 577 - protein, 14 aa, Artificial Sequence
  Description of Artificial Sequence: Synthetic peptide
  N-term Acetic Acid
  MOD_RES (1)..(1): (R)-2-allylpyrrolidine-2-carboxylic acid
  MOD_RES (3)..(3): (S)-2-amino-4,4-dimethylpentanoic acid
  MOD_RES (4)..(4): 2-amino-2-(pent-4-en-1-yl)hept-6-enoic acid
  MOD_RES (11)..(11): (S)-3-amino-1-((pent-4-en-1-yloxy)carbonyl)pyrrolidine-3- carboxylic acid
  MOD_RES (12)..(12): (S)-2-amino-3-(thiophen-3-yl)propanoic acid
  MOD_RES (13)..(13): (S)-2-amino-3-(benzo[b]thiophen-3-yl)propanoic acid
  C-term amino
XDXXDNAAFFXXXQ

SEQ ID NO: 578 - protein, 14 aa, Artificial Sequence
  Description of Artificial Sequence: Synthetic peptide
  N-term Acetic Acid
  MOD_RES (1)..(1): (R)-2-allylpyrrolidine-2-carboxylic acid
  MOD_RES (3)..(3): (S)-2-amino-4,4-dimethylpentanoic acid
  MOD_RES (4)..(4): 2-amino-2-(pent-4-en-1-yl)hept-6-enoic acid
  MOD_RES (11)..(11): (S)-3-amino-1-((pent-4-en-1-yloxy)carbonyl)pyrrolidine-3- carboxylic acid
  MOD_RES (12)..(12): (S)-2-amino-3-(thiophen-3-yl)propanoic acid
  MOD_RES (13)..(13): (S)-2-amino-3-(benzo[b]thiophen-3-yl)propanoic acid
  C-term amino
XDXXDNAAFLXXXQ

SEQ ID NO: 579 - protein, 13 aa, Artificial Sequence
  Description of Artificial Sequence: Synthetic peptide
  N-term Acetic Acid
  MOD_RES (1)..(1): (R)-2-allylpyrrolidine-2-carboxylic acid
  MOD_RES (3)..(3): (S)-2-amino-4,4-dimethylpentanoic acid
  MOD_RES (4)..(4): 2-amino-2-(pent-4-en-1-yl)hept-6-enoic acid
  MOD_RES (11)..(11): (S)-3-amino-1-((pent-4-en-1-yloxy)carbonyl)pyrrolidine-3- carboxylic acid
  MOD_RES (12)..(12): (S)-2-amino-3-(thiophen-3-yl)propanoic acid
  MOD_RES (13)..(13): (S)-2-amino-3-(benzo[b]thiophen-3-yl)propanoic acid
  C-term amino
XDXXDNAAFNXXX

SEQ ID NO: 580 - protein, 13 aa, Artificial Sequence
  Description of Artificial Sequence: Synthetic peptide
  N-term Acetic Acid
  MOD_RES (1)..(1): (R)-2-allylpyrrolidine-2-carboxylic acid
  MOD_RES (3)..(3): (S)-2-amino-4,4-dimethylpentanoic acid
  MOD_RES (4)..(4): 2-amino-2-(pent-4-en-1-yl)hept-6-enoic acid
  MOD_RES (11)..(11): (S)-3-amino-1-((pent-4-en-1-yloxy)carbonyl)pyrrolidine-3- carboxylic acid
  MOD_RES (12)..(12): (S)-2-amino-3-(thiophen-3-yl)propanoic acid
  MOD_RES (13)..(13): (S)-2-amino-3-(benzo[b]thiophen-3-yl)propanoic acid
  C-term amino
XDXXDQAAFNXXX

SEQ ID NO: 581 - protein, 13 aa, Artificial Sequence
  Description of Artificial Sequence: Synthetic peptide
  N-term Acetic Acid
  MOD_RES (1)..(1): (R)-2-allylpyrrolidine-2-carboxylic acid
  MOD_RES (3)..(3): (S)-2-amino-4,4-dimethylpentanoic acid
  MOD_RES (4)..(4): 2-amino-2-(pent-4-en-1-yl)hept-6-enoic acid
  MOD_RES (11)..(11): (S)-3-amino-1-((pent-4-en-1-yloxy)carbonyl)pyrrolidine-3- carboxylic acid
  MOD_RES (12)..(12): (S)-2-amino-3-(thiophen-3-yl)propanoic acid
  MOD_RES (13)..(13): (S)-2-amino-3-(benzo[b]thiophen-3-yl)propanoic acid
  C-term amino
XDXXDTAAFNXXX

SEQ ID NO: 582 - protein, 13 aa, Artificial Sequence
  Description of Artificial Sequence: Synthetic peptide
  N-term Acetic Acid
  MOD_RES (1)..(1): (R)-2-allylpyrrolidine-2-carboxylic acid
  MOD_RES (3)..(3): (S)-2-amino-4,4-dimethylpentanoic acid
  MOD_RES (4)..(4): 2-amino-2-(pent-4-en-1-yl)hept-6-enoic acid
  MOD_RES (6)..(6): (S)-2-amino-5-ureidopentanoic acid
  MOD_RES (11)..(11): (S)-3-amino-1-((pent-4-en-1-yloxy)carbonyl)pyrrolidine-3- carboxylic acid
  MOD_RES (12)..(12): (S)-2-amino-3-(thiophen-3-yl)propanoic acid
  MOD_RES (13)..(13): (S)-2-amino-3-(benzo[b]thiophen-3-yl)propanoic acid
  C-term amino
XDXXDXAAFNXXX

SEQ ID NO: 583 - protein, 13 aa, Artificial Sequence
  Description of Artificial Sequence: Synthetic peptide
  N-term Acetic Acid
  MOD_RES (1)..(1): (R)-2-allylpyrrolidine-2-carboxylic acid
  MOD_RES (3)..(3): (S)-2-amino-4,4-dimethylpentanoic acid
  MOD_RES (4)..(4): 2-amino-2-(pent-4-en-1-yl)hept-6-enoic acid
  MOD_RES (11)..(11): (S)-3-amino-1-((pent-4-en-1-yloxy)carbonyl)pyrrolidine-3- carboxylic acid
  MOD_RES (12)..(12): (S)-2-amino-3-(thiophen-3-yl)propanoic acid
  MOD_RES (13)..(13): (S)-2-amino-3-(benzo[b]thiophen-3-yl)propanoic acid
  C-term amino
XDXXDLAAFNXXX

SEQ ID NO: 584 - protein, 13 aa, Artificial Sequence
  Description of Artificial Sequence: Synthetic peptide
  N-term Acetic Acid
  MOD_RES (1)..(1): (R)-2-allylpyrrolidine-2-carboxylic acid
  MOD_RES (3)..(3): (S)-2-amino-4,4-dimethylpentanoic acid
  MOD_RES (4)..(4): 2-amino-2-(pent-4-en-1-yl)hept-6-enoic acid
  MOD_RES (11)..(11): (S)-3-amino-1-((pent-4-en-1-yloxy)carbonyl)pyrrolidine-3- carboxylic acid
  MOD_RES (12)..(12): (S)-2-amino-3-(thiophen-3-yl)propanoic acid
  MOD_RES (13)..(13): (S)-2-amino-3-(benzo[b]thiophen-3-yl)propanoic acid
  C-term amino
XDXXDHAAFNXXX

SEQ ID NO: 585 - protein, 14 aa, Artificial Sequence
  Description of Artificial Sequence: Synthetic peptide
  N-term Acetic Acid
  MOD_RES (1)..(1): (R)-2-allylpyrrolidine-2-carboxylic acid
  MOD_RES (3)..(3): (S)-2-amino-4,4-dimethylpentanoic acid
  MOD_RES (4)..(4): 2-amino-2-(pent-4-en-1-yl)hept-6-enoic acid
  MOD_RES (11)..(11): (S)-3-amino-1-((pent-4-en-1-yloxy)carbonyl)pyrrolidine-3- carboxylic acid
  MOD_RES (12)..(12): (S)-2-amino-3-(thiophen-3-yl)propanoic acid
  MOD_RES (13)..(13): (S)-2-amino-3-(benzo[b]thiophen-3-yl)propanoic acid
  C-term amino
XDXXDHAAFNXXXQ

SEQ ID NO: 586 - protein, 14 aa, Artificial Sequence
  Description of Artificial Sequence: Synthetic peptide
  N-term Acetic Acid
  MOD_RES (1)..(1): (R)-2-allylpyrrolidine-2-carboxylic acid
  MOD_RES (3)..(3): (S)-2-amino-4,4-dimethylpentanoic acid
  MOD_RES (4)..(4): 2-amino-2-(pent-4-en-1-yl)hept-6-enoic acid
  MOD_RES (7)..(7): N6-(2-(4-((3',6'-dihydroxy-3-oxo-3H-spiro[isobenzofuran-1,9' -xanthene]-6-carboxamido)methyl)-1H-1,2,3-triazol-1-yl)acetyl) -L-lysine
  MOD_RES (11)..(11): (S)-3-amino-1-((pent-4-en-1-yloxy)carbonyl)pyrrolidine-3- carboxylic acid
  MOD_RES (12)..(12): (S)-2-amino-3-(thiophen-3-yl)propanoic acid
  MOD_RES (13)..(13): (S)-2-amino-3-(benzo[b]thiophen-3-yl)propanoic acid
  C-term amino
XDXXDDKAFNXXXH

SEQ ID NO: 587 - protein, 14 aa, Artificial Sequence
  Description of Artificial Sequence: Synthetic peptide
  N-term Acetic Acid
  MOD_RES (1)..(1): (R)-2-allylpyrrolidine-2-carboxylic acid
  MOD_RES (3)..(3): (S)-2-amino-4,4-dimethylpentanoic acid
  MOD_RES (4)..(4): 2-amino-2-(pent-4-en-1-yl)hept-6-enoic acid
  MOD_RES (8)..(8): N6-(2-(4-((3',6'-dihydroxy-3-oxo-3H-spiro[isobenzofuran-1,9' -xanthene]-6-carboxamido)methyl)-1H-1,2,3-triazol-1-yl)acetyl) -L-lysine
  MOD_RES (11)..(11): (S)-3-amino-1-((pent-4-en-1-yloxy)carbonyl)pyrrolidine-3- carboxylic acid
  MOD_RES (12)..(12): (S)-2-amino-3-(thiophen-3-yl)propanoic acid
  MOD_RES (13)..(13): (S)-2-amino-3-(benzo[b]thiophen-3-yl)propanoic acid
  C-term amino
XDXXDDAKFNXXXH

SEQ ID NO: 588 - protein, 14 aa, Artificial Sequence
  Description of Artificial Sequence: Synthetic peptide
  N-term Acetic Acid
  MOD_RES (1)..(1): (R)-2-allylpyrrolidine-2-carboxylic acid
  MOD_RES (3)..(3): (S)-2-amino-4,4-dimethylpentanoic acid
  MOD_RES (4)..(4): 2-amino-2-(pent-4-en-1-yl)hept-6-enoic acid
  MOD_RES (7)..(7): N6-(4-(4-((3',6'-dihydroxy-3-oxo-3H-spiro[isobenzofuran-1,9'- xanthene]-6-carboxamido)methyl)-1H-1,2,3-triazol-1-yl)benzoyl) -L-lysine
  MOD_RES (11)..(11): (S)-3-amino-1-((pent-4-en-1-yloxy)carbonyl)pyrrolidine-3- carboxylic acid
  MOD_RES (12)..(12): (S)-2-amino-3-(thiophen-3-yl)propanoic acid
  MOD_RES (13)..(13): (S)-2-amino-3-(benzo[b]thiophen-3-yl)propanoic acid
  C-term amino
XDXXDLKAFNXXXQ

SEQ ID NO: 589 - protein, 14 aa, Artificial Sequence
  Description of Artificial Sequence: Synthetic peptide
  N-term Acetic Acid
  MOD_RES (1)..(1): (R)-2-allylpyrrolidine-2-carboxylic acid
  MOD_RES (3)..(3): (S)-2-amino-4,4-dimethylpentanoic acid
  MOD_RES (4)..(4): 2-amino-2-(pent-4-en-1-yl)hept-6-enoic acid
  MOD_RES (7)..(7): N6-(4-(4-((3',6'-dihydroxy-3-oxo-3H-spiro[isobenzofuran-1,9'- xanthene]-6-carboxamido)methyl)-1H-1,2,3-triazol-1-yl)benzoyl) -L-lysine
  MOD_RES (11)..(11): (S)-3-amino-1-((pent-4-en-1-yloxy)carbonyl)pyrrolidine-3- carboxylic acid
  MOD_RES (12)..(12): (S)-2-amino-3-(thiophen-3-yl)propanoic acid
  MOD_RES (13)..(13): (S)-2-amino-3-(benzo[b]thiophen-3-yl)propanoic acid
  C-term amino
XDXXDLKAFLXXXQ

SEQ ID NO: 590 - protein, 14 aa, Artificial Sequence
  Description of Artificial Sequence: Synthetic peptide
  N-term Acetic Acid
  MOD_RES (1)..(1): (R)-2-allylpyrrolidine-2-carboxylic acid
  MOD_RES (3)..(3): (S)-2-amino-4,4-dimethylpentanoic acid
  MOD_RES (4)..(4): 2-amino-2-(pent-4-en-1-yl)hept-6-enoic acid
  MOD_RES (7)..(7): N6-(4-(4-((3',6'-dihydroxy-3-oxo-3H-spiro[isobenzofuran-1,9'- xanthene]-6-carboxamido)methyl)-1H-1,2,3-triazol-1-yl)benzoyl) -L-lysine
  MOD_RES (11)..(11): (S)-3-amino-1-((pent-4-en-1-yloxy)carbonyl)pyrrolidine-3- carboxylic acid
  MOD_RES (12)..(12): (S)-2-amino-3-(thiophen-3-yl)propanoic acid
  MOD_RES (13)..(13): (S)-2-amino-3-(benzo[b]thiophen-3-yl)propanoic acid
  C-term amino
XDXXDLKAFFXXXQ

SEQ ID NO: 591 - protein, 16 aa, Artificial Sequence
  Description of Artificial Sequence: Synthetic peptide
  N-term Acetic Acid
  MOD_RES (1)..(1): (R)-2-allylpyrrolidine-2-carboxylic acid
  MOD_RES (3)..(3): (S)-2-amino-4,4-dimethylpentanoic acid
  MOD_RES (4)..(4): 2-amino-2-(pent-4-en-1-yl)hept-6-enoic acid
  MOD_RES (11)..(11): (S)-3-amino-1-((pent-4-en-1-yloxy)carbonyl)pyrrolidine-3- carboxylic acid
  MOD_RES (12)..(12): (S)-2-amino-3-(thiophen-3-yl)propanoic acid
  MOD_RES (13)..(13): (S)-2-amino-3-(benzo[b]thiophen-3-yl)propanoic acid
XDXXDDAAFNXXXQAA

SEQ ID NO: 592 - protein, 16 aa, Artificial Sequence
  Description of Artificial Sequence: Synthetic peptide
  N-term Acetic Acid
  MOD_RES (1)..(1): (R)-2-allylpyrrolidine-2-carboxylic acid
  MOD_RES (3)..(3): (S)-2-amino-4,4-dimethylpentanoic acid
  MOD_RES (4)..(4): 2-amino-2-(pent-4-en-1-yl)hept-6-enoic acid
  MOD_RES (11)..(11): (S)-3-amino-1-((pent-4-en-1-yloxy)carbonyl)pyrrolidine-3- carboxylic acid
  MOD_RES (12)..(12): (S)-2-amino-3-(thiophen-3-yl)propanoic acid
  MOD_RES (13)..(13): (S)-2-amino-3-(benzo[b]thiophen-3-yl)propanoic acid
  MOD_RES (15)..(15): D-alanine
XDXXDDAAFNXXXQAA

SEQ ID NO: 593 - protein, 16 aa, Artificial Sequence
  Description of Artificial Sequence: Synthetic peptide
  N-term Acetic Acid
  MOD_RES (1)..(1): (R)-2-allylpyrrolidine-2-carboxylic acid
  MOD_RES (3)..(3): (S)-2-amino-4,4-dimethylpentanoic acid
  MOD_RES (4)..(4): 2-amino-2-(pent-4-en-1-yl)hept-6-enoic acid
  MOD_RES (11)..(11): (S)-3-amino-1-((pent-4-en-1-yloxy)carbonyl)pyrrolidine-3- carboxylic acid
  MOD_RES (12)..(12): (S)-2-amino-3-(thiophen-3-yl)propanoic acid
  MOD_RES (13)..(13): (S)-2-amino-3-(benzo[b]thiophen-3-yl)propanoic acid
  MOD_RES (15)..(15): D-alanine
  MOD_RES (16)..(16): D-alanine
XDXXDDAAFNXXXQAA

SEQ ID NO: 594 - protein, 16 aa, Artificial Sequence
  Description of Artificial Sequence: Synthetic peptide
  N-term Acetic Acid
  MOD_RES (1)..(1): (R)-2-allylpyrrolidine-2-carboxylic acid
  MOD_RES (3)..(3): (S)-2-amino-4,4-dimethylpentanoic acid
  MOD_RES (4)..(4): 2-amino-2-(pent-4-en-1-yl)hept-6-enoic acid
  MOD_RES (11)..(11): (S)-2-amino-2-methyldec-9-enoic acid
  MOD_RES (12)..(12): (S)-2-amino-3-(thiophen-3-yl)propanoic acid
  MOD_RES (13)..(13): (S)-2-amino-3-(benzo[b]thiophen-3-yl)propanoic acid
XDXXDDAAFNXXXQAA

SEQ ID NO: 595 - protein, 16 aa, Artificial Sequence
  Description of Artificial Sequence: Synthetic peptide
  N-term Acetic Acid
  MOD_RES (1)..(1): (R)-2-allylpyrrolidine-2-carboxylic acid
  MOD_RES (3)..(3): (S)-2-amino-4,4-dimethylpentanoic acid
  MOD_RES (4)..(4): 2-amino-2-(pent-4-en-1-yl)hept-6-enoic acid
  MOD_RES (11)..(11): (S)-2-amino-2-methyldec-9-enoic acid
  MOD_RES (12)..(12): (S)-2-amino-3-(thiophen-3-yl)propanoic acid
  MOD_RES (13)..(13): (S)-2-amino-3-(benzo[b]thiophen-3-yl)propanoic acid
  MOD_RES (15)..(15): D-alanine
XDXXDDAAFNXXXQAA

SEQ ID NO: 596 - protein, 16 aa, Artificial Sequence
  Description of Artificial Sequence: Synthetic peptide
  N-term Acetic Acid
  MOD_RES (1)..(1): (R)-2-allylpyrrolidine-2-carboxylic acid
  MOD_RES (3)..(3): (S)-2-amino-4,4-dimethylpentanoic acid
  MOD_RES (4)..(4): 2-amino-2-(pent-4-en-1-yl)hept-6-enoic acid
  MOD_RES (11)..(11): (S)-2-amino-2-methyldec-9-enoic acid
  MOD_RES (12)..(12): (S)-2-amino-3-(thiophen-3-yl)propanoic acid
  MOD_RES (13)..(13): (S)-2-amino-3-(benzo[b]thiophen-3-yl)propanoic acid
  MOD_RES (15)..(15): D-alanine
  MOD_RES (16)..(16): D-alanine
XDXXDDAAFNXXXQAA

SEQ ID NO: 597 - protein, 14 aa, Artificial Sequence
  Description of Artificial Sequence: Synthetic peptide
  N-term Acetic Acid
  MOD_RES (1)..(1): (R)-2-allylpyrrolidine-2-carboxylic acid
  MOD_RES (3)..(3): (S)-2-amino-4,4-dimethylpentanoic acid
  MOD_RES (4)..(4): 2-amino-2-(pent-4-en-1-yl)hept-6-enoic acid
  MOD_RES (11)..(11): (S)-3-amino-1-((pent-4-en-1-yloxy)carbonyl)pyrrolidine-3- carboxylic acid
  MOD_RES (12)..(12): (S)-2-amino-3-(thiophen-3-yl)propanoic acid
  MOD_RES (13)..(13): (S)-2-amino-3-(benzo[b]thiophen-3-yl)propanoic acid
  MOD_RES (14)..(14): N6-(2-azidoacetyl)-L-lysine
  C-term amino
XDXXDDAAFNXXXK

SEQ ID NO: 598 - protein, 14 aa, Artificial Sequence
  Description of Artificial Sequence: Synthetic peptide
  N-term Acetic Acid
  MOD_RES (1)..(1): (R)-2-allylpyrrolidine-2-carboxylic acid
  MOD_RES (3)..(3): (S)-2-amino-4,4-dimethylpentanoic acid
  MOD_RES (4)..(4): 2-amino-2-(pent-4-en-1-yl)hept-6-enoic acid
  MOD_RES (7)..(7): N6-(2-azidoacetyl)-L-lysine
  MOD_RES (11)..(11): (S)-3-amino-1-((pent-4-en-1-yloxy)carbonyl)pyrrolidine-3- carboxylic acid
  MOD_RES (12)..(12): (S)-2-amino-3-(thiophen-3-yl)propanoic acid
  MOD_RES (13)..(13): (S)-2-amino-3-(benzo[b]thiophen-3-yl)propanoic acid
  C-term amino
XDXXDDKAFNXXXQ

SEQ ID NO: 599 - protein, 14 aa, Artificial Sequence
  Description of Artificial Sequence: Synthetic peptide
  N-term Acetic Acid
  MOD_RES (1)..(1): (R)-2-allylpyrrolidine-2-carboxylic acid
  MOD_RES (3)..(3): N6-(2-azidoacetyl)-L-lysine
  MOD_RES (4)..(4): 2-amino-2-(pent-4-en-1-yl)hept-6-enoic acid
  MOD_RES (11)..(11): (S)-3-amino-1-((pent-4-en-1-yloxy)carbonyl)pyrrolidine-3- carboxylic acid
  MOD_RES (12)..(12): (S)-2-amino-3-(thiophen-3-yl)propanoic acid
  MOD_RES (13)..(13): (S)-2-amino-3-(benzo[b]thiophen-3-yl)propanoic acid
  C-term amino
XDKXDDAAFNXXXQ

SEQ ID NO: 600 - protein, 14 aa, Artificial Sequence
  Description of Artificial Sequence: Synthetic peptide
  N-term Acetic Acid
  MOD_RES (1)..(1): (R)-2-allylpyrrolidine-2-carboxylic acid
  MOD_RES (3)..(3): (S)-2-amino-4,4-dimethylpentanoic acid
  MOD_RES (4)..(4): 2-amino-2-(pent-4-en-1-yl)hept-6-enoic acid
  MOD_RES (11)..(11): (S)-3-amino-1-((pent-4-en-1-yloxy)carbonyl)pyrrolidine-3- carboxylic acid
  MOD_RES (12)..(12): (S)-2-amino-3-(thiophen-3-yl)propanoic acid
  MOD_RES (13)..(13): (S)-2-amino-3-(benzo[b]thiophen-3-yl)propanoic acid
  C-term hexane-1,6-diamine
XDXXDDAAFNXXXQ

SEQ ID NO: 601 - protein, 14 aa, Artificial Sequence
  Description of Artificial Sequence: Synthetic peptide
  N-term Acetic Acid
  MOD_RES (1)..(1): (R)-2-allylpyrrolidine-2-carboxylic acid
  MOD_RES (3)..(3): (S)-2-amino-4,4-dimethylpentanoic acid
  MOD_RES (4)..(4): 2-amino-2-(pent-4-en-1-yl)hept-6-enoic acid
  MOD_RES (8)..(8): N6-(3-(3,5-bis(trifluoromethyl)phenyl)propanoyl)-L-lysine
  MOD_RES (11)..(11): (S)-3-amino-1-((pent-4-en-1-yloxy)carbonyl)pyrrolidine-3- carboxylic acid
  MOD_RES (12)..(12): (S)-2-amino-3-(thiophen-3-yl)propanoic acid
  MOD_RES (13)..(13): (S)-2-amino-3-(benzo[b]thiophen-3-yl)propanoic acid
  C-term amino
XDXXDDAKFNXXXQ

SEQ ID NO: 602 - protein, 14 aa, Artificial Sequence
  Description of Artificial Sequence: Synthetic peptide
  N-term Acetic Acid
  MOD_RES (1)..(1): (R)-2-allylpyrrolidine-2-carboxylic acid
  MOD_RES (3)..(3): (S)-2-amino-4,4-dimethylpentanoic acid
  MOD_RES (4)..(4): 2-amino-2-(pent-4-en-1-yl)hept-6-enoic acid
  MOD_RES (8)..(8): N6-(3-(naphthalen-1-yl)propanoyl)-L-lysine
  MOD_RES (11)..(11): (S)-3-amino-1-((pent-4-en-1-yloxy)carbonyl)pyrrolidine-3- carboxylic acid
  MOD_RES (12)..(12): (S)-2-amino-3-(thiophen-3-yl)propanoic acid
  MOD_RES (13)..(13): (S)-2-amino-3-(benzo[b]thiophen-3-yl)propanoic acid
  C-term amino
XDXXDDAKFNXXXQ

SEQ ID NO: 603 - protein, 14 aa, Artificial Sequence
  Description of Artificial Sequence: Synthetic peptide
  N-term Acetic Acid
  MOD_RES (1)..(1): (R)-2-allylpyrrolidine-2-carboxylic acid
  MOD_RES (3)..(3): (S)-2-amino-4,4-dimethylpentanoic acid
  MOD_RES (4)..(4): 2-amino-2-(pent-4-en-1-yl)hept-6-enoic acid
  MOD_RES (8)..(8): N6-(2,2-diphenylpropanoyl)-L-lysine
  MOD_RES (11)..(11): (S)-3-amino-1-((pent-4-en-1-yloxy)carbonyl)pyrrolidine-3- carboxylic acid
  MOD_RES (12)..(12): (S)-2-amino-3-(thiophen-3-yl)propanoic acid
  MOD_RES (13)..(13): (S)-2-amino-3-(benzo[b]thiophen-3-yl)propanoic acid
  C-term amino
XDXXDDAKFNXXXQ

SEQ ID NO: 604 - protein, 14 aa, Artificial Sequence
  Description of Artificial Sequence: Synthetic peptide
  N-term Acetic Acid
  MOD_RES (1)..(1): (R)-2-allylpyrrolidine-2-carboxylic acid
  MOD_RES (3)..(3): (S)-2-amino-4,4-dimethylpentanoic acid
  MOD_RES (4)..(4): 2-amino-2-(pent-4-en-1-yl)hept-6-enoic acid
  MOD_RES (8)..(8): N6-(2-morpholinoacetyl)-L-lysine
  MOD_RES (11)..(11): (S)-3-amino-1-((pent-4-en-1-yloxy)carbonyl)pyrrolidine-3- carboxylic acid
  MOD_RES (12)..(12): (S)-2-amino-3-(thiophen-3-yl)propanoic acid
  MOD_RES (13)..(13): (S)-2-amino-3-(benzo[b]thiophen-3-yl)propanoic acid
  C-term amino
XDXXDDAKFNXXXQ

SEQ ID NO: 605 - protein, 14 aa, Artificial Sequence
  Description of Artificial Sequence: Synthetic peptide
  N-term Acetic Acid
  MOD_RES (1)..(1): (R)-2-allylpyrrolidine-2-carboxylic acid
  MOD_RES (3)..(3): (S)-2-amino-4,4-dimethylpentanoic acid
  MOD_RES (4)..(4): 2-amino-2-(pent-4-en-1-yl)hept-6-enoic acid
  MOD_RES (8)..(8): N6-(2-(4-methylpiperazin-1-yl)acetyl)-L-lysine
  MOD_RES (11)..(11): (S)-3-amino-1-((pent-4-en-1-yloxy)carbonyl)pyrrolidine-3- carboxylic acid
  MOD_RES (12)..(12): (S)-2-amino-3-(thiophen-3-yl)propanoic acid
  MOD_RES (13)..(13): (S)-2-amino-3-(benzo[b]thiophen-3-yl)propanoic acid
  C-term amino
XDXXDDAKFNXXXQ

SEQ ID NO: 606 - protein, 14 aa, Artificial Sequence
  Description of Artificial Sequence: Synthetic peptide
  N-term Acetic Acid
  MOD_RES (1)..(1): (R)-2-allylpyrrolidine-2-carboxylic acid
  MOD_RES (3)..(3): (S)-2-amino-4,4-dimethylpentanoic acid
  MOD_RES (4)..(4): 2-amino-2-(pent-4-en-1-yl)hept-6-enoic acid
  MOD_RES (8)..(8): N6-(1'-methyl-[1,4'-bipiperidine]-4-carbonyl)-L-lysine
  MOD_RES (11)..(11): (S)-3-amino-1-((pent-4-en-1-yloxy)carbonyl)pyrrolidine-3- carboxylic acid
  MOD_RES (12)..(12): (S)-2-amino-3-(thiophen-3-yl)propanoic acid
  MOD_RES (13)..(13): (S)-2-amino-3-(benzo[b]thiophen-3-yl)propanoic acid
  C-term amino
XDXXDDAKFNXXXQ

SEQ ID NO: 607 - protein, 14 aa, Artificial Sequence
  Description of Artificial Sequence: Synthetic peptide
  N-term Acetic Acid
  MOD_RES (1)..(1): (R)-2-allylpyrrolidine-2-carboxylic acid
  MOD_RES (3)..(3): (S)-2-amino-4,4-dimethylpentanoic acid
  MOD_RES (4)..(4): 2-amino-2-(pent-4-en-1-yl)hept-6-enoic acid
  MOD_RES (8)..(8): N6-(4-((4-methylpiperazin-1-yl)methyl)benzoyl)-L-lysine
  MOD_RES (11)..(11): (S)-3-amino-1-((pent-4-en-1-yloxy)carbonyl)pyrrolidine-3- carboxylic acid
  MOD_RES (12)..(12): (S)-2-amino-3-(thiophen-3-yl)propanoic acid
  MOD_RES (13)..(13): (S)-2-amino-3-(benzo[b]thiophen-3-yl)propanoic acid
  C-term amino
XDXXDDAKFNXXXQ

SEQ ID NO: 608 - protein, 14 aa, Artificial Sequence
  Description of Artificial Sequence: Synthetic peptide
  N-term Acetic Acid
  MOD_RES (1)..(1): (R)-2-allylpyrrolidine-2-carboxylic acid
  MOD_RES (3)..(3): (S)-2-amino-4,4-dimethylpentanoic acid
  MOD_RES (4)..(4): 2-amino-2-(pent-4-en-1-yl)hept-6-enoic acid
  MOD_RES (8)..(8): N6-(4-(morpholinomethyl)benzoyl)-L-lysine
  MOD_RES (11)..(11): (S)-3-amino-1-((pent-4-en-1-yloxy)carbonyl)pyrrolidine-3- carboxylic acid
  MOD_RES (12)..(12): (S)-2-amino-3-(thiophen-3-yl)propanoic acid
  MOD_RES (13)..(13): (S)-2-amino-3-(benzo[b]thiophen-3-yl)propanoic acid
  C-term amino
XDXXDDAKFNXXXQ

SEQ ID NO: 609 - protein, 14 aa, Artificial Sequence
  Description of Artificial Sequence: Synthetic peptide
  N-term Acetic Acid
  MOD_RES (1)..(1): (R)-2-allylpyrrolidine-2-carboxylic acid
  MOD_RES (3)..(3): (S)-2-amino-4,4-dimethylpentanoic acid
  MOD_RES (4)..(4): 2-amino-2-(pent-4-en-1-yl)hept-6-enoic acid
  MOD_RES (8)..(8): N6-(4-((dimethylamino)methyl)benzoyl)-L-lysine
  MOD_RES (11)..(11): (S)-3-amino-1-((pent-4-en-1-yloxy)carbonyl)pyrrolidine-3- carboxylic acid
  MOD_RES (12)..(12): (S)-2-amino-3-(thiophen-3-yl)propanoic acid
  MOD_RES (13)..(13): (S)-2-amino-3-(benzo[b]thiophen-3-yl)propanoic acid
  C-term amino
XDXXDDAKFNXXXQ

SEQ ID NO: 610 - protein, 14 aa, Artificial Sequence
  Description of Artificial Sequence: Synthetic peptide
  N-term Acetic Acid
  MOD_RES (1)..(1): (R)-2-allylpyrrolidine-2-carboxylic acid
  MOD_RES (3)..(3): (S)-2-amino-4,4-dimethylpentanoic acid
  MOD_RES (4)..(4): 2-amino-2-(pent-4-en-1-yl)hept-6-enoic acid
  MOD_RES (8)..(8): N6-(3-(2-methoxyethoxy)propanoyl)-L-lysine
  MOD_RES (11)..(11): (S)-3-amino-1-((pent-4-en-1-yloxy)carbonyl)pyrrolidine-3- carboxylic acid
  MOD_RES (12)..(12): (S)-2-amino-3-(thiophen-3-yl)propanoic acid
  MOD_RES (13)..(13): (S)-2-amino-3-(benzo[b]thiophen-3-yl)propanoic acid
  C-term amino
XDXXDDAKFNXXXQ

SEQ ID NO: 611 - protein, 14 aa, Artificial Sequence
  Description of Artificial Sequence: Synthetic peptide
  N-term Acetic Acid
  MOD_RES (1)..(1): (R)-2-allylpyrrolidine-2-carboxylic acid
  MOD_RES (3)..(3): (S)-2-amino-4,4-dimethylpentanoic acid
  MOD_RES (4)..(4): 2-amino-2-(pent-4-en-1-yl)hept-6-enoic acid
  MOD_RES (8)..(8): (S)-20-amino-14-oxo-2,5,8,11-tetraoxa-15-azahenicosan-21-oic acid
  MOD_RES (11)..(11): (S)-3-amino-1-((pent-4-en-1-yloxy)carbonyl)pyrrolidine-3- carboxylic acid
  MOD_RES (12)..(12): (S)-2-amino-3-(thiophen-3-yl)propanoic acid
  MOD_RES (13)..(13): (S)-2-amino-3-(benzo[b]thiophen-3-yl)propanoic acid
  C-term amino
XDXXDDAXFNXXXQ

SEQ ID NO: 612 - protein, 14 aa, Artificial Sequence
  Description of Artificial Sequence: Synthetic peptide
  N-term Acetic Acid
  MOD_RES (1)..(1): (R)-2-allylpyrrolidine-2-carboxylic acid
  MOD_RES (3)..(3): (S)-2-amino-4,4-dimethylpentanoic acid
  MOD_RES (4)..(4): 2-amino-2-(pent-4-en-1-yl)hept-6-enoic acid
  MOD_RES (8)..(8): (S)-26-amino-20-oxo-2,5,8,11,14,17-hexaoxa-21-azaheptacosan-27-oic acid
  MOD_RES (11)..(11): (S)-3-amino-1-((pent-4-en-1-yloxy)carbonyl)pyrrolidine-3- carboxylic acid
  MOD_RES (12)..(12): (S)-2-amino-3-(thiophen-3-yl)propanoic acid
  MOD_RES (13)..(13): (S)-2-amino-3-(benzo[b]thiophen-3-yl)propanoic acid
  C-term amino
XDXXDDAXFNXXXQ

SEQ ID NO: 613 - protein, 14 aa, Artificial Sequence
  Description of Artificial Sequence: Synthetic peptide
  N-term Acetic Acid
  MOD_RES (1)..(1): (R)-2-allylpyrrolidine-2-carboxylic acid
  MOD_RES (3)..(3): (S)-2-amino-4,4-dimethylpentanoic acid
  MOD_RES (4)..(4): 2-amino-2-(pent-4-en-1-yl)hept-6-enoic acid
  MOD_RES (8)..(8): (S)-32-amino-26-oxo-2,5,8,11,14,17,20,23-octaoxa-27- azatritriacontan-33-oic acid
  MOD_RES (11)..(11): (S)-3-amino-1-((pent-4-en-1-yloxy)carbonyl)pyrrolidine-3- carboxylic acid
  MOD_RES (12)..(12): (S)-2-amino-3-(thiophen-3-yl)propanoic acid
  MOD_RES (13)..(13): (S)-2-amino-3-(benzo[b]thiophen-3-yl)propanoic acid
  C-term amino
XDXXDDAXFNXXXQ

SEQ ID NO: 614 - protein, 14 aa, Artificial Sequence
  Description of Artificial Sequence: Synthetic peptide
  N-term Acetic Acid
  MOD_RES (1)..(1): (R)-2-allylpyrrolidine-2-carboxylic acid
  MOD_RES (3)..(3): (S)-2-amino-4,4-dimethylpentanoic acid
  MOD_RES (4)..(4): 2-amino-2-(pent-4-en-1-yl)hept-6-enoic acid
  MOD_RES (8)..(8): N6-butyryl-L-lysine
  MOD_RES (11)..(11): (S)-3-amino-1-((pent-4-en-1-yloxy)carbonyl)pyrrolidine-3- carboxylic acid
  MOD_RES (12)..(12): (S)-2-amino-3-(thiophen-3-yl)propanoic acid
  MOD_RES (13)..(13): (S)-2-amino-3-(benzo[b]thiophen-3-yl)propanoic acid
  C-term amino
XDXXDDAKFNXXXQ

SEQ ID NO: 615 - protein, 14 aa, Artificial Sequence
  Description of Artificial Sequence: Synthetic peptide
  N-term Acetic Acid
  MOD_RES (1)..(1): (R)-2-allylpyrrolidine-2-carboxylic acid
  MOD_RES (3)..(3): (S)-2-amino-4,4-dimethylpentanoic acid
  MOD_RES (4)..(4): 2-amino-2-(pent-4-en-1-yl)hept-6-enoic acid
  MOD_RES (8)..(8): N6-octanoyl-L-lysine
  MOD_RES (11)..(11): (S)-3-amino-1-((pent-4-en-1-yloxy)carbonyl)pyrrolidine-3- carboxylic acid
  MOD_RES (12)..(12): (S)-2-amino-3-(thiophen-3-yl)propanoic acid
  MOD_RES (13)..(13): (S)-2-amino-3-(benzo[b]thiophen-3-yl)propanoic acid
  C-term amino
XDXXDDAKFNXXXQ

SEQ ID NO: 616 - protein, 14 aa, Artificial Sequence
  Description of Artificial Sequence: Synthetic peptide
  N-term Acetic Acid
  MOD_RES (1)..(1): (R)-2-allylpyrrolidine-2-carboxylic acid
  MOD_RES (3)..(3): (S)-2-amino-4,4-dimethylpentanoic acid
  MOD_RES (4)..(4): 2-amino-2-(pent-4-en-1-yl)hept-6-enoic acid
  MOD_RES (8)..(8): N6-(adamantane-1-carbonyl)-L-lysine
  MOD_RES (11)..(11): (S)-3-amino-1-((pent-4-en-1-yloxy)carbonyl)pyrrolidine-3- carboxylic acid
  MOD_RES (12)..(12): (S)-2-amino-3-(thiophen-3-yl)propanoic acid
  MOD_RES (13)..(13): (S)-2-amino-3-(benzo[b]thiophen-3-yl)propanoic acid
  C-term amino
XDXXDDAKFNXXXQ

SEQ ID NO: 617 - protein, 14 aa, Artificial Sequence
  Description of Artificial Sequence: Synthetic peptide
  N-term Acetic Acid
  MOD_RES (1)..(1): (R)-2-allylpyrrolidine-2-carboxylic acid
  MOD_RES (3)..(3): (S)-2-amino-4,4-dimethylpentanoic acid
  MOD_RES (4)..(4): 2-amino-2-(pent-4-en-1-yl)hept-6-enoic acid
  MOD_RES (8)..(8): N6-((3S,5S,7S)-3,5,7-trimethyladamantane-1-carbonyl)-L-lysine
  MOD_RES (11)..(11): (S)-3-amino-1-((pent-4-en-1-yloxy)carbonyl)pyrrolidine-3- carboxylic acid
  MOD_RES (12)..(12): (S)-2-amino-3-(thiophen-3-yl)propanoic acid
  MOD_RES (13)..(13): (S)-2-amino-3-(benzo[b]thiophen-3-yl)propanoic acid
  C-term amino
XDXXDDAKFNXXXQ

SEQ ID NO: 618 - protein, 14 aa, Artificial Sequence
  Description of Artificial Sequence: Synthetic peptide
  N-term Acetic Acid
  MOD_RES (1)..(1): (R)-2-allylpyrrolidine-2-carboxylic acid
  MOD_RES (3)..(3): (S)-2-amino-4,4-dimethylpentanoic acid
  MOD_RES (4)..(4): 2-amino-2-(pent-4-en-1-yl)hept-6-enoic acid
  MOD_RES (8)..(8): N6-(3-(adamantan-1-yl)propanoyl)-L-lysine
  MOD_RES (11)..(11): (S)-3-amino-1-((pent-4-en-1-yloxy)carbonyl)pyrrolidine-3- carboxylic acid
  MOD_RES (12)..(12): (S)-2-amino-3-(thiophen-3-yl)propanoic acid
  MOD_RES (13)..(13): (S)-2-amino-3-(benzo[b]thiophen-3-yl)propanoic acid
  C-term amino
XDXXDDAKFNXXXQ

SEQ ID NO: 619 - protein, 15 aa, Artificial Sequence
  Description of Artificial Sequence: Synthetic peptide
  N-term Acetic Acid
  MOD_RES (1)..(1): (R)-2-allylpyrrolidine-2-carboxylic acid
  MOD_RES (3)..(3): (S)-2-amino-4,4-dimethylpentanoic acid
  MOD_RES (4)..(4): 2-amino-2-(pent-4-en-1-yl)hept-6-enoic acid
  MOD_RES (11)..(11): (S)-3-amino-1-((pent-4-en-1-yloxy)carbonyl)pyrrolidine-3- carboxylic acid
  MOD_RES (12)..(12): (S)-2-amino-3-(thiophen-3-yl)propanoic acid
  MOD_RES (13)..(13): (S)-2-amino-3-(benzo[b]thiophen-3-yl)propanoic acid
  MOD_RES (15)..(15): N6-(3-(3,5-bis(trifluoromethyl)phenyl)propanoyl)-L-lysine
  C-term amino
XDXXDDAAFNXXXQK

SEQ ID NO: 620 - protein, 15 aa, Artificial Sequence
  Description of Artificial Sequence: Synthetic peptide
  N-term Acetic Acid
  MOD_RES (1)..(1): (R)-2-allylpyrrolidine-2-carboxylic acid
  MOD_RES (3)..(3): (S)-2-amino-4,4-dimethylpentanoic acid
  MOD_RES (4)..(4): 2-amino-2-(pent-4-en-1-yl)hept-6-enoic acid
  MOD_RES (11)..(11): (S)-3-amino-1-((pent-4-en-1-yloxy)carbonyl)pyrrolidine-3- carboxylic acid
  MOD_RES (12)..(12): (S)-2-amino-3-(thiophen-3-yl)propanoic acid
  MOD_RES (13)..(13): (S)-2-amino-3-(benzo[b]thiophen-3-yl)propanoic acid
  MOD_RES (15)..(15): N6-(3-(naphthalen-1-yl)propanoyl)-L-lysine
  C-term amino
XDXXDDAAFNXXXQK

SEQ ID NO: 621 - protein, 15 aa, Artificial Sequence
  Description of Artificial Sequence: Synthetic peptide
  N-term Acetic Acid
  MOD_RES (1)..(1): (R)-2-allylpyrrolidine-2-carboxylic acid
  MOD_RES (3)..(3): (S)-2-amino-4,4-dimethylpentanoic acid
  MOD_RES (4)..(4): 2-amino-2-(pent-4-en-1-yl)hept-6-enoic acid
  MOD_RES (11)..(11): (S)-3-amino-1-((pent-4-en-1-yloxy)carbonyl)pyrrolidine-3- carboxylic acid
  MOD_RES (12)..(12): (S)-2-amino-3-(thiophen-3-yl)propanoic acid
  MOD_RES (13)..(13): (S)-2-amino-3-(benzo[b]thiophen-3-yl)propanoic acid
  MOD_RES (15)..(15): N6-(2,2-diphenylpropanoyl)-L-lysine
  C-term amino
XDXXDDAAFNXXXQK

SEQ ID NO: 622 - protein, 15 aa, Artificial Sequence
  Description of Artificial Sequence: Synthetic peptide
  N-term Acetic Acid
  MOD_RES (1)..(1): (R)-2-allylpyrrolidine-2-carboxylic acid
  MOD_RES (3)..(3): (S)-2-amino-4,4-dimethylpentanoic acid
  MOD_RES (4)..(4): 2-amino-2-(pent-4-en-1-yl)hept-6-enoic acid
  MOD_RES (11)..(11): (S)-3-amino-1-((pent-4-en-1-yloxy)carbonyl)pyrrolidine-3- carboxylic acid
  MOD_RES (12)..(12): (S)-2-amino-3-(thiophen-3-yl)propanoic acid
  MOD_RES (13)..(13): (S)-2-amino-3-(benzo[b]thiophen-3-yl)propanoic acid
  MOD_RES (15)..(15): N6-(2-morpholinoacetyl)-L-lysine
  C-term amino
XDXXDDAAFNXXXQK

SEQ ID NO: 623 - protein, 15 aa, Artificial Sequence
  Description of Artificial Sequence: Synthetic peptide
  N-term Acetic Acid
  MOD_RES (1)..(1): (R)-2-allylpyrrolidine-2-carboxylic acid
  MOD_RES (3)..(3): (S)-2-amino-4,4-dimethylpentanoic acid
  MOD_RES (4)..(4): 2-amino-2-(pent-4-en-1-yl)hept-6-enoic acid
  MOD_RES (11)..(11): (S)-3-amino-1-((pent-4-en-1-yloxy)carbonyl)pyrrolidine-3- carboxylic acid
  MOD_RES (12)..(12): (S)-2-amino-3-(thiophen-3-yl)propanoic acid
  MOD_RES (13)..(13): (S)-2-amino-3-(benzo[b]thiophen-3-yl)propanoic acid
  MOD_RES (15)..(15): N6-(2-(4-methylpiperazin-1-yl)acetyl)-L-lysine
  C-term amino
XDXXDDAAFNXXXQK

SEQ ID NO: 624 - protein, 15 aa, Artificial Sequence
  Description of Artificial Sequence: Synthetic peptide
  N-term Acetic Acid
  MOD_RES (1)..(1): (R)-2-allylpyrrolidine-2-carboxylic acid
  MOD_RES (3)..(3): (S)-2-amino-4,4-dimethylpentanoic acid
  MOD_RES (4)..(4): 2-amino-2-(pent-4-en-1-yl)hept-6-enoic acid
  MOD_RES (11)..(11): (S)-3-amino-1-((pent-4-en-1-yloxy)carbonyl)pyrrolidine-3- carboxylic acid
  MOD_RES (12)..(12): (S)-2-amino-3-(thiophen-3-yl)propanoic acid
  MOD_RES (13)..(13): (S)-2-amino-3-(benzo[b]thiophen-3-yl)propanoic acid
  MOD_RES (15)..(15): N6-(1'-methyl-[1,4'-bipiperidine]-4-carbonyl)-L-lysine
  C-term amino
XDXXDDAAFNXXXQK

SEQ ID NO: 625 - protein, 15 aa, Artificial Sequence
  Description of Artificial Sequence: Synthetic peptide
  N-term Acetic Acid
  MOD_RES (1)..(1): (R)-2-allylpyrrolidine-2-carboxylic acid
  MOD_RES (3)..(3): (S)-2-amino-4,4-dimethylpentanoic acid
  MOD_RES (4)..(4): 2-amino-2-(pent-4-en-1-yl)hept-6-enoic acid
  MOD_RES (11)..(11): (S)-3-amino-1-((pent-4-en-1-yloxy)carbonyl)pyrrolidine-3- carboxylic acid
  MOD_RES (12)..(12): (S)-2-amino-3-(thiophen-3-yl)propanoic acid
  MOD_RES (13)..(13): (S)-2-amino-3-(benzo[b]thiophen-3-yl)propanoic acid
  MOD_RES (15)..(15): N6-(4-((4-methylpiperazin-1-yl)methyl)benzoyl)-L-lysine
  C-term amino
XDXXDDAAFNXXXQK

SEQ ID NO: 626 - protein, 15 aa, Artificial Sequence
  Description of Artificial Sequence: Synthetic peptide
  N-term Acetic Acid
  MOD_RES (1)..(1): (R)-2-allylpyrrolidine-2-carboxylic acid
  MOD_RES (3)..(3): (S)-2-amino-4,4-dimethylpentanoic acid
  MOD_RES (4)..(4): 2-amino-2-(pent-4-en-1-yl)hept-6-enoic acid
  MOD_RES (11)..(11): (S)-3-amino-1-((pent-4-en-1-yloxy)carbonyl)pyrrolidine-3- carboxylic acid
  MOD_RES (12)..(12): (S)-2-amino-3-(thiophen-3-yl)propanoic acid
  MOD_RES (13)..(13): (S)-2-amino-3-(benzo[b]thiophen-3-yl)propanoic acid
  MOD_RES (15)..(15): N6-(4-(morpholinomethyl)benzoyl)-L-lysine
  C-term amino
XDXXDDAAFNXXXQK

SEQ ID NO: 627 - protein, 15 aa, Artificial Sequence
  Description of Artificial Sequence: Synthetic peptide
  N-term Acetic Acid
  MOD_RES (1)..(1): (R)-2-allylpyrrolidine-2-carboxylic acid
  MOD_RES (3)..(3): (S)-2-amino-4,4-dimethylpentanoic acid
  MOD_RES (4)..(4): 2-amino-2-(pent-4-en-1-yl)hept-6-enoic acid
  MOD_RES (11)..(11): (S)-3-amino-1-((pent-4-en-1-yloxy)carbonyl)pyrrolidine-3- carboxylic acid
  MOD_RES (12)..(12): (S)-2-amino-3-(thiophen-3-yl)propanoic acid
  MOD_RES (13)..(13): (S)-2-amino-3-(benzo[b]thiophen-3-yl)propanoic acid
  MOD_RES (15)..(15): N6-(4-((dimethylamino)methyl)benzoyl)-L-lysine
  C-term amino
XDXXDDAAFNXXXQK

SEQ ID NO: 628 - protein, 15 aa, Artificial Sequence
  Description of Artificial Sequence: Synthetic peptide
  N-term Acetic Acid
  MOD_RES (1)..(1): (R)-2-allylpyrrolidine-2-carboxylic acid
  MOD_RES (3)..(3): (S)-2-amino-4,4-dimethylpentanoic acid
  MOD_RES (4)..(4): 2-amino-2-(pent-4-en-1-yl)hept-6-enoic acid
  MOD_RES (11)..(11): (S)-3-amino-1-((pent-4-en-1-yloxy)carbonyl)pyrrolidine-3- carboxylic acid
  MOD_RES (12)..(12): (S)-2-amino-3-(thiophen-3-yl)propanoic acid
  MOD_RES (13)..(13): (S)-2-amino-3-(benzo[b]thiophen-3-yl)propanoic acid
  MOD_RES (15)..(15): N6-(3-(2-methoxyethoxy)propanoyl)-L-lysine
  C-term amino
XDXXDDAAFNXXXQK

SEQ ID NO: 629 - protein, 15 aa, Artificial Sequence
  Description of Artificial Sequence: Synthetic peptide
  N-term Acetic Acid
  MOD_RES (1)..(1): (R)-2-allylpyrrolidine-2-carboxylic acid
  MOD_RES (3)..(3): (S)-2-amino-4,4-dimethylpentanoic acid
  MOD_RES (4)..(4): 2-amino-2-(pent-4-en-1-yl)hept-6-enoic acid
  MOD_RES (11)..(11): (S)-3-amino-1-((pent-4-en-1-yloxy)carbonyl)pyrrolidine-3- carboxylic acid
  MOD_RES (12)..(12): (S)-2-amino-3-(thiophen-3-yl)propanoic acid
  MOD_RES (13)..(13): (S)-2-amino-3-(benzo[b]thiophen-3-yl)propanoic acid
  MOD_RES (15)..(15): (S)-20-amino-14-oxo-2,5,8,11-tetraoxa-15-azahenicosan-21-oic acid
  C-term amino
XDXXDDAAFNXXXQX

SEQ ID NO: 630 - protein, 15 aa, Artificial Sequence
  Description of Artificial Sequence: Synthetic peptide
  N-term Acetic Acid
  MOD_RES (1)..(1): (R)-2-allylpyrrolidine-2-carboxylic acid
  MOD_RES (3)..(3): (S)-2-amino-4,4-dimethylpentanoic acid
  MOD_RES (4)..(4): 2-amino-2-(pent-4-en-1-yl)hept-6-enoic acid
  MOD_RES (11)..(11): (S)-3-amino-1-((pent-4-en-1-yloxy)carbonyl)pyrrolidine-3- carboxylic acid
  MOD_RES (12)..(12): (S)-2-amino-3-(thiophen-3-yl)propanoic acid
  MOD_RES (13)..(13): (S)-2-amino-3-(benzo[b]thiophen-3-yl)propanoic acid
  MOD_RES (15)..(15): (S)-26-amino-20-oxo-2,5,8,11,14,17-hexaoxa-21-azaheptacosan-27-oic acid
  C-term amino
XDXXDDAAFNXXXQX

SEQ ID NO: 631 - protein, 15 aa, Artificial Sequence
  Description of Artificial Sequence: Synthetic peptide
  N-term Acetic Acid
  MOD_RES (1)..(1): (R)-2-allylpyrrolidine-2-carboxylic acid
  MOD_RES (3)..(3): (S)-2-amino-4,4-dimethylpentanoic acid
  MOD_RES (4)..(4): 2-amino-2-(pent-4-en-1-yl)hept-6-enoic acid
  MOD_RES (11)..(11): (S)-3-amino-1-((pent-4-en-1-yloxy)carbonyl)pyrrolidine-3- carboxylic acid
  MOD_RES (12)..(12): (S)-2-amino-3-(thiophen-3-yl)propanoic acid
  MOD_RES (13)..(13): (S)-2-amino-3-(benzo[b]thiophen-3-yl)propanoic acid
  MOD_RES (15)..(15): (S)-32-amino-26-oxo-2,5,8,11,14,17,20,23-octaoxa-27- azatritriacontan-33-oic acid
  C-term amino
XDXXDDAAFNXXXQX

SEQ ID NO: 632 - protein, 15 aa, Artificial Sequence
  Description of Artificial Sequence: Synthetic peptide
  N-term Acetic Acid
  MOD_RES (1)..(1): (R)-2-allylpyrrolidine-2-carboxylic acid
  MOD_RES (3)..(3): (S)-2-amino-4,4-dimethylpentanoic acid
  MOD_RES (4)..(4): 2-amino-2-(pent-4-en-1-yl)hept-6-enoic acid
  MOD_RES (11)..(11): (S)-3-amino-1-((pent-4-en-1-yloxy)carbonyl)pyrrolidine-3- carboxylic acid
  MOD_RES (12)..(12): (S)-2-amino-3-(thiophen-3-yl)propanoic acid
  MOD_RES (13)..(13): (S)-2-amino-3-(benzo[b]thiophen-3-yl)propanoic acid
  MOD_RES (15)..(15): N6-(2-naphthoyl)-L-lysine
  C-term amino
XDXXDDAAFNXXXQK

SEQ ID NO: 633 - protein, 15 aa, Artificial Sequence
  Description of Artificial Sequence: Synthetic peptide
  N-term Acetic Acid
  MOD_RES (1)..(1): (R)-2-allylpyrrolidine-2-carboxylic acid
  MOD_RES (3)..(3): (S)-2-amino-4,4-dimethylpentanoic acid
  MOD_RES (4)..(4): 2-amino-2-(pent-4-en-1-yl)hept-6-enoic acid
  MOD_RES (11)..(11): (S)-3-amino-1-((pent-4-en-1-yloxy)carbonyl)pyrrolidine-3- carboxylic acid
  MOD_RES (12)..(12): (S)-2-amino-3-(thiophen-3-yl)propanoic acid
  MOD_RES (13)..(13): (S)-2-amino-3-(benzo[b]thiophen-3-yl)propanoic acid
  MOD_RES (15)..(15): N6-(1-naphthoyl)-L-lysine
  C-term amino
XDXXDDAAFNXXXQK

SEQ ID NO: 634 - protein, 15 aa, Artificial Sequence
  Description of Artificial Sequence: Synthetic peptide
  N-term Acetic Acid
  MOD_RES (1)..(1): (R)-2-allylpyrrolidine-2-carboxylic acid
  MOD_RES (3)..(3): (S)-2-amino-4,4-dimethylpentanoic acid
  MOD_RES (4)..(4): 2-amino-2-(pent-4-en-1-yl)hept-6-enoic acid
  MOD_RES (11)..(11): (S)-3-amino-1-((pent-4-en-1-yloxy)carbonyl)pyrrolidine-3- carboxylic acid
  MOD_RES (12)..(12): (S)-2-amino-3-(thiophen-3-yl)propanoic acid
  MOD_RES (13)..(13): (S)-2-amino-3-(benzo[b]thiophen-3-yl)propanoic acid
  MOD_RES (15)..(15): N6-butyryl-L-lysine
  C-term amino
XDXXDDAAFNXXXQK

SEQ ID NO: 635 - protein, 15 aa, Artificial Sequence
  Description of Artificial Sequence: Synthetic peptide
  N-term Acetic Acid
  MOD_RES (1)..(1): (R)-2-allylpyrrolidine-2-carboxylic acid
  MOD_RES (3)..(3): (S)-2-amino-4,4-dimethylpentanoic acid
  MOD_RES (4)..(4): 2-amino-2-(pent-4-en-1-yl)hept-6-enoic acid
  MOD_RES (11)..(11): (S)-3-amino-1-((pent-4-en-1-yloxy)carbonyl)pyrrolidine-3- carboxylic acid
  MOD_RES (12)..(12): (S)-2-amino-3-(thiophen-3-yl)propanoic acid
  MOD_RES (13)..(13): (S)-2-amino-3-(benzo[b]thiophen-3-yl)propanoic acid
  MOD_RES (15)..(15): N6-octanoyl-L-lysine
  C-term amino
XDXXDDAAFNXXXQK

SEQ ID NO: 636 - protein, 15 aa, Artificial Sequence
  Description of Artificial Sequence: Synthetic peptide
  N-term Acetic Acid
  MOD_RES (1)..(1): (R)-2-allylpyrrolidine-2-carboxylic acid
  MOD_RES (3)..(3): (S)-2-amino-4,4-dimethylpentanoic acid
  MOD_RES (4)..(4): 2-amino-2-(pent-4-en-1-yl)hept-6-enoic acid
  MOD_RES (11)..(11): (S)-3-amino-1-((pent-4-en-1-yloxy)carbonyl)pyrrolidine-3- carboxylic acid
  MOD_RES (12)..(12): (S)-2-amino-3-(thiophen-3-yl)propanoic acid
  MOD_RES (13)..(13): (S)-2-amino-3-(benzo[b]thiophen-3-yl)propanoic acid
  MOD_RES (15)..(15): N6-(adamantane-1-carbonyl)-L-lysine
  C-term amino
XDXXDDAAFNXXXQK

SEQ ID NO: 637 - protein, 15 aa, Artificial Sequence
  Description of Artificial Sequence: Synthetic peptide
  N-term Acetic Acid
  MOD_RES (1)..(1): (R)-2-allylpyrrolidine-2-carboxylic acid
  MOD_RES (3)..(3): (S)-2-amino-4,4-dimethylpentanoic acid
  MOD_RES (4)..(4): 2-amino-2-(pent-4-en-1-yl)hept-6-enoic acid
  MOD_RES (11)..(11): (S)-3-amino-1-((pent-4-en-1-yloxy)carbonyl)pyrrolidine-3- carboxylic acid
  MOD_RES (12)..(12): (S)-2-amino-3-(thiophen-3-yl)propanoic acid
  MOD_RES (13)..(13): (S)-2-amino-3-(benzo[b]thiophen-3-yl)propanoic acid
  MOD_RES (15)..(15): N6-((3S,5S,7S)-3,5,7-trimethyladamantane-1-carbonyl)-L-lysine
  C-term amino
XDXXDDAAFNXXXQK

SEQ ID NO: 638 - protein, 14 aa, Artificial Sequence
  Description of Artificial Sequence: Synthetic peptide
  N-term Acetic Acid
  MOD_RES (1)..(1): (R)-2-allylpyrrolidine-2-carboxylic acid
  MOD_RES (3)..(3): (S)-2-amino-4,4-dimethylpentanoic acid
  MOD_RES (4)..(4): 2-amino-2-(pent-4-en-1-yl)hept-6-enoic acid
  MOD_RES (6)..(6): (S)-2-amino-3-((carboxymethyl)(2,2,2-trifluoroethyl)amino) propanoic acid
  MOD_RES (11)..(11): (S)-3-amino-1-((pent-4-en-1-yloxy)carbonyl)pyrrolidine-3- carboxylic acid
  MOD_RES (12)..(12): (S)-2-amino-3-(2-chlorophenyl)propanoic acid
  MOD_RES (13)..(13): (S)-2-amino-3-(benzo[b]thiophen-3-yl)propanoic acid
  C-term amino
XDXXDXAAFNXFXQ

SEQ ID NO: 639 - protein, 14 aa, Artificial Sequence
  Description of Artificial Sequence: Synthetic peptide
  N-term Acetic Acid
  MOD_RES (1)..(1): (R)-2-allylpyrrolidine-2-carboxylic acid
  MOD_RES (3)..(3): (S)-2-amino-4,4-dimethylpentanoic acid
  MOD_RES (4)..(4): 2-amino-2-(pent-4-en-1-yl)hept-6-enoic acid
  MOD_RES (6)..(6): (S)-2-amino-3-((carboxymethyl)(2,2,2-trifluoroethyl)amino) propanoic acid
  MOD_RES (11)..(11): (S)-3-amino-1-((pent-4-en-1-yloxy)carbonyl)pyrrolidine-3- carboxylic acid
  MOD_RES (12)..(12): (S)-2-amino-3-(2-chlorophenyl)propanoic acid
  MOD_RES (13)..(13): (S)-2-amino-3-(benzo[b]thiophen-3-yl)propanoic acid
  C-term amino
XDXXDXAAFTXFXQ

SEQ ID NO: 640 - protein, 14 aa, Artificial Sequence
  Description of Artificial Sequence: Synthetic peptide
  N-term Acetic Acid
  MOD_RES (1)..(1): (R)-2-allylpyrrolidine-2-carboxylic acid
  MOD_RES (3)..(3): (S)-2-amino-4,4-dimethylpentanoic acid
  MOD_RES (4)..(4): 2-amino-2-(pent-4-en-1-yl)hept-6-enoic acid
  MOD_RES (6)..(6): (S)-2-amino-3-((carboxymethyl)(2,2,2-trifluoroethyl)amino) propanoic acid
  MOD_RES (11)..(11): (S)-3-amino-1-((pent-4-en-1-yloxy)carbonyl)pyrrolidine-3- carboxylic acid
  MOD_RES (12)..(12): (S)-2-amino-3-(2-chlorophenyl)propanoic acid
  MOD_RES (13)..(13): (S)-2-amino-3-(benzo[b]thiophen-3-yl)propanoic acid
  C-term amino
XDXXDXAAFFXFXQ

SEQ ID NO: 641 - protein, 14 aa, Artificial Sequence
  Description of Artificial Sequence: Synthetic peptide
  N-term Acetic Acid
  MOD_RES (1)..(1): (R)-2-allylpyrrolidine-2-carboxylic acid
  MOD_RES (3)..(3): (S)-2-amino-4,4-dimethylpentanoic acid
  MOD_RES (4)..(4): 2-amino-2-(pent-4-en-1-yl)hept-6-enoic acid
  MOD_RES (6)..(6): (S)-2-amino-3-((carboxymethyl)(2,2,2-trifluoroethyl)amino) propanoic acid
  MOD_RES (11)..(11): (S)-3-amino-1-((pent-4-en-1-yloxy)carbonyl)pyrrolidine-3- carboxylic acid
  MOD_RES (12)..(12): (S)-2-amino-3-(2-bromophenyl)propanoic acid
  MOD_RES (13)..(13): (S)-2-amino-3-(benzo[b]thiophen-3-yl)propanoic acid
  C-term amino
XDXXDXAAFNXFXQ

SEQ ID NO: 642 - protein, 14 aa, Artificial Sequence
  Description of Artificial Sequence: Synthetic peptide
  N-term Acetic Acid
  MOD_RES (1)..(1): (R)-2-allylpyrrolidine-2-carboxylic acid
  MOD_RES (3)..(3): (S)-2-amino-4,4-dimethylpentanoic acid
  MOD_RES (4)..(4): 2-amino-2-(pent-4-en-1-yl)hept-6-enoic acid
  MOD_RES (6)..(6): (S)-2-amino-3-((carboxymethyl)(2,2,2-trifluoroethyl)amino) propanoic acid
  MOD_RES (11)..(11): (S)-3-amino-1-((pent-4-en-1-yloxy)carbonyl)pyrrolidine-3- carboxylic acid
  MOD_RES (12)..(12): (S)-2-amino-3-(3-chlorophenyl)propanoic acid
  MOD_RES (13)..(13): (S)-2-amino-3-(benzo[b]thiophen-3-yl)propanoic acid
  C-term amino
XDXXDXAAFNXFXQ

SEQ ID NO: 643 - protein, 14 aa, Artificial Sequence
  Description of Artificial Sequence: Synthetic peptide
  N-term Acetic Acid
  MOD_RES (1)..(1): (R)-2-allylpyrrolidine-2-carboxylic acid
  MOD_RES (3)..(3): (S)-2-amino-4,4-dimethylpentanoic acid
  MOD_RES (4)..(4): 2-amino-2-(pent-4-en-1-yl)hept-6-enoic acid
  MOD_RES (6)..(6): (S)-2-amino-3-((carboxymethyl)(2,2,2-trifluoroethyl)amino) propanoic acid
  MOD_RES (11)..(11): (S)-3-amino-1-((pent-4-en-1-yloxy)carbonyl)pyrrolidine-3- carboxylic acid
  MOD_RES (12)..(12): (S)-2-amino-3-(2-(trifluoromethyl)phenyl)propanoic acid
  MOD_RES (13)..(13): (S)-2-amino-3-(benzo[b]thiophen-3-yl)propanoic acid
  C-term amino
XDXXDXAAFNXFXQ

SEQ ID NO: 644 - protein, 14 aa, Artificial Sequence
  Description of Artificial Sequence: Synthetic peptide
  N-term Acetic Acid
  MOD_RES (1)..(1): (R)-2-allylpyrrolidine-2-carboxylic acid
  MOD_RES (3)..(3): (S)-2-amino-4,4-dimethylpentanoic acid
  MOD_RES (4)..(4): 2-amino-2-(pent-4-en-1-yl)hept-6-enoic acid
  MOD_RES (6)..(6): (S)-2-amino-3-((carboxymethyl)(2,2,2-trifluoroethyl)amino) propanoic acid
  MOD_RES (11)..(11): (S)-2-amino-2-methyldec-9-enoic acid
  MOD_RES (12)..(12): (S)-2-amino-3-(2-chlorophenyl)propanoic acid
  MOD_RES (13)..(13): (S)-2-amino-3-(benzo[b]thiophen-3-yl)propanoic acid
  C-term amino
XDXXDXAAFNXFXQ

SEQ ID NO: 645 - protein, 14 aa, Artificial Sequence
  Description of Artificial Sequence: Synthetic peptide
  N-term Acetic Acid
  MOD_RES (1)..(1): (R)-2-allylpyrrolidine-2-carboxylic acid
  MOD_RES (3)..(3): (S)-2-amino-4,4-dimethylpentanoic acid
  MOD_RES (4)..(4): 2-amino-2-(pent-4-en-1-yl)hept-6-enoic acid
  MOD_RES (6)..(6): (S)-2-amino-3-((carboxymethyl)(2,2,2-trifluoroethyl)amino) propanoic acid
  MOD_RES (11)..(11): (S)-2-amino-2-methyldec-9-enoic acid
  MOD_RES (12)..(12): (S)-2-amino-3-(2-chlorophenyl)propanoic acid
  MOD_RES (13)..(13): (S)-2-amino-3-(benzo[b]thiophen-3-yl)propanoic acid
  C-term amino
XDXXDXAAFTXFXQ

SEQ ID NO: 646 - protein, 14 aa, Artificial Sequence
  Description of Artificial Sequence: Synthetic peptide
  N-term Acetic Acid
  MOD_RES (1)..(1): (R)-2-allylpyrrolidine-2-carboxylic acid
  MOD_RES (3)..(3): (S)-2-amino-4,4-dimethylpentanoic acid
  MOD_RES (4)..(4): 2-amino-2-(pent-4-en-1-yl)hept-6-enoic acid
  MOD_RES (6)..(6): (S)-2-amino-3-((carboxymethyl)(2,2,2-trifluoroethyl)amino) propanoic acid
  MOD_RES (11)..(11): (S)-2-amino-2-methyldec-9-enoic acid
  MOD_RES (12)..(12): (S)-2-amino-3-(2-chlorophenyl)propanoic acid
  MOD_RES (13)..(13): (S)-2-amino-3-(benzo[b]thiophen-3-yl)propanoic acid
  C-term amino
XDXXDXAAFFXFXQ

SEQ ID NO: 647 - protein, 14 aa, Artificial Sequence
  Description of Artificial Sequence: Synthetic peptide
  N-term Acetic Acid
  MOD_RES (1)..(1): (R)-2-allylpyrrolidine-2-carboxylic acid
  MOD_RES (3)..(3): (S)-2-amino-4,4-dimethylpentanoic acid
  MOD_RES (4)..(4): 2-amino-2-(pent-4-en-1-yl)hept-6-enoic acid
  MOD_RES (6)..(6): (S)-2-amino-3-((carboxymethyl)(2,2,2-trifluoroethyl)amino) propanoic acid
  MOD_RES (11)..(11): (S)-2-amino-2-methyldec-9-enoic acid
  MOD_RES (12)..(12): (S)-2-amino-3-(2-bromophenyl)propanoic acid
  MOD_RES (13)..(13): (S)-2-amino-3-(benzo[b]thiophen-3-yl)propanoic acid
  C-term amino
XDXXDXAAFNXFXQ

SEQ ID NO: 648 - protein, 14 aa, Artificial Sequence
  Description of Artificial Sequence: Synthetic peptide
  N-term Acetic Acid
  MOD_RES (1)..(1): (R)-2-allylpyrrolidine-2-carboxylic acid
  MOD_RES (3)..(3): (S)-2-amino-4,4-dimethylpentanoic acid
  MOD_RES (4)..(4): 2-amino-2-(pent-4-en-1-yl)hept-6-enoic acid
  MOD_RES (6)..(6): (S)-2-amino-3-((carboxymethyl)(2,2,2-trifluoroethyl)amino) propanoic acid
  MOD_RES (11)..(11): (S)-2-amino-2-methyldec-9-enoic acid
  MOD_RES (12)..(12): (S)-2-amino-3-(3-chlorophenyl)propanoic acid
  MOD_RES (13)..(13): (S)-2-amino-3-(benzo[b]thiophen-3-yl)propanoic acid
  C-term amino
XDXXDXAAFNXFXQ

SEQ ID NO: 649 - protein, 14 aa, Artificial Sequence
  Description of Artificial Sequence: Synthetic peptide
  N-term Acetic Acid
  MOD_RES (1)..(1): (R)-2-allylpyrrolidine-2-carboxylic acid
  MOD_RES (3)..(3): (S)-2-amino-4,4-dimethylpentanoic acid
  MOD_RES (4)..(4): 2-amino-2-(pent-4-en-1-yl)hept-6-enoic acid
  MOD_RES (6)..(6): (S)-2-amino-3-((carboxymethyl)(2,2,2-trifluoroethyl)amino) propanoic acid
  MOD_RES (11)..(11): (S)-2-amino-2-methyldec-9-enoic acid
  MOD_RES (12)..(12): (S)-2-amino-3-(2-(trifluoromethyl)phenyl)propanoic acid
  MOD_RES (13)..(13): (S)-2-amino-3-(benzo[b]thiophen-3-yl)propanoic acid
  C-term amino
XDXXDXAAFNXFXQ

SEQ ID NO: 650 - protein, 15 aa, Artificial Sequence
  Description of Artificial Sequence: Synthetic peptide
  N-term Acetic Acid
  MOD_RES (1)..(1): (R)-2-allylpyrrolidine-2-carboxylic acid
  MOD_RES (3)..(3): (S)-2-amino-4,4-dimethylpentanoic acid
  MOD_RES (4)..(4): 2-amino-2-(pent-4-en-1-yl)hept-6-enoic acid
  MOD_RES (11)..(11): (S)-3-amino-1-((pent-4-en-1-yloxy)carbonyl)pyrrolidine-3- carboxylic acid
  MOD_RES (12)..(12): (S)-2-amino-3-(thiophen-3-yl)propanoic acid
  MOD_RES (13)..(13): (S)-2-amino-3-(benzo[b]thiophen-3-yl)propanoic acid
  MOD_RES (15)..(15): N6-(3-(prop-2-yn-1-yloxy)propanoyl)-L-lysine
  C-term amino
XDXXDDAAFNXXXQK

SEQ ID NO: 651 - protein, 15 aa, Artificial Sequence
  Description of Artificial Sequence: Synthetic peptide
  N-term Acetic Acid
  MOD_RES (1)..(1): (R)-2-allylpyrrolidine-2-carboxylic acid
  MOD_RES (3)..(3): (S)-2-amino-4,4-dimethylpentanoic acid
  MOD_RES (4)..(4): 2-amino-2-(pent-4-en-1-yl)hept-6-enoic acid
  MOD_RES (11)..(11): (S)-3-amino-1-((pent-4-en-1-yloxy)carbonyl)pyrrolidine-3- carboxylic acid
  MOD_RES (12)..(12): (S)-2-amino-3-(thiophen-3-yl)propanoic acid
  MOD_RES (13)..(13): (S)-2-amino-3-(benzo[b]thiophen-3-yl)propanoic acid
  MOD_RES (15)..(15): N6-(3-(2-(prop-2-yn-1-yloxy)ethoxy)propanoyl)-L-lysine
  C-term amino
XDXXDDAAFNXXXQK

SEQ ID NO: 652 - protein, 15 aa, Artificial Sequence
  Description of Artificial Sequence: Synthetic peptide
  N-term Acetic Acid
  MOD_RES (1)..(1): (R)-2-allylpyrrolidine-2-carboxylic acid
  MOD_RES (3)..(3): (S)-2-amino-4,4-dimethylpentanoic acid
  MOD_RES (4)..(4): 2-amino-2-(pent-4-en-1-yl)hept-6-enoic acid
  MOD_RES (11)..(11): (S)-3-amino-1-((pent-4-en-1-yloxy)carbonyl)pyrrolidine-3- carboxylic acid
  MOD_RES (12)..(12): (S)-2-amino-3-(thiophen-3-yl)propanoic acid
  MOD_RES (13)..(13): (S)-2-amino-3-(benzo[b]thiophen-3-yl)propanoic acid
  MOD_RES (15)..(15): (S)-19-amino-13-oxo-4,7,10-trioxa-14-azaicos-1-yn-20-oic acid
  C-term amino
XDXXDDAAFNXXXQX

SEQ ID NO: 653 - protein, 15 aa, Artificial Sequence
  Description of Artificial Sequence: Synthetic peptide
  N-term Acetic Acid
  MOD_RES (1)..(1): (R)-2-allylpyrrolidine-2-carboxylic acid
  MOD_RES (3)..(3): (S)-2-amino-4,4-dimethylpentanoic acid
  MOD_RES (4)..(4): 2-amino-2-(pent-4-en-1-yl)hept-6-enoic acid
  MOD_RES (11)..(11): (S)-3-amino-1-((pent-4-en-1-yloxy)carbonyl)pyrrolidine-3- carboxylic acid
  MOD_RES (12)..(12): (S)-2-amino-3-(thiophen-3-yl)propanoic acid
  MOD_RES (13)..(13): (S)-2-amino-3-(benzo[b]thiophen-3-yl)propanoic acid
  MOD_RES (15)..(15): (S)-22-amino-16-oxo-4,7,10,13-tetraoxa-17-azatricos-1-yn-23-oic acid
  C-term amino
XDXXDDAAFNXXXQX

SEQ ID NO: 654 - protein, 15 aa, Artificial Sequence
  Description of Artificial Sequence: Synthetic peptide
  N-term Acetic Acid
  MOD_RES (1)..(1): (R)-2-allylpyrrolidine-2-carboxylic acid
  MOD_RES (3)..(3): (S)-2-amino-4,4-dimethylpentanoic acid
  MOD_RES (4)..(4): 2-amino-2-(pent-4-en-1-yl)hept-6-enoic acid
  MOD_RES (11)..(11): (S)-3-amino-1-((pent-4-en-1-yloxy)carbonyl)pyrrolidine-3- carboxylic acid
  MOD_RES (12)..(12): (S)-2-amino-3-(thiophen-3-yl)propanoic acid
  MOD_RES (13)..(13): (S)-2-amino-3-(benzo[b]thiophen-3-yl)propanoic acid
  C-term amino
XDXXDDAAFNXXXQK

SEQ ID NO: 655 - protein, 14 aa, Artificial Sequence
  Description of Artificial Sequence: Synthetic peptide
  N-term Acetic Acid
  MOD_RES (1)..(1): (R)-2-allylpyrrolidine-2-carboxylic acid
  MOD_RES (3)..(3): (S)-2-amino-4,4-dimethylpentanoic acid
  MOD_RES (4)..(4): 2-amino-2-(pent-4-en-1-yl)hept-6-enoic acid
  MOD_RES (6)..(6): (S)-2-amino-3-((carboxymethyl)(2,2,2-trifluoroethyl)amino) propanoic acid
  MOD_RES (11)..(11): (S)-3-amino-1-((pent-4-en-1-yloxy)carbonyl)pyrrolidine-3- carboxylic acid
  MOD_RES (12)..(12): (S)-2-amino-3-(thiophen-3-yl)propanoic acid
  MOD_RES (13)..(13): (S)-2-amino-3-(benzo[b]thiophen-3-yl)propanoic acid
  C-term amino
XDXXDXAAFNXXXS

SEQ ID NO: 656 - protein, 14 aa, Artificial Sequence
  Description of Artificial Sequence: Synthetic peptide
  N-term Acetic Acid
  MOD_RES (1)..(1): (R)-2-allylpyrrolidine-2-carboxylic acid
  MOD_RES (3)..(3): (S)-2-amino-4,4-dimethylpentanoic acid
  MOD_RES (4)..(4): 2-amino-2-(pent-4-en-1-yl)hept-6-enoic acid
  MOD_RES (6)..(6): (S)-2-amino-3-((carboxymethyl)(2,2,2-trifluoroethyl)amino) propanoic acid
  MOD_RES (11)..(11): (S)-3-amino-1-((pent-4-en-1-yloxy)carbonyl)pyrrolidine-3- carboxylic acid
  MOD_RES (12)..(12): (S)-2-amino-3-(thiophen-3-yl)propanoic acid
  MOD_RES (13)..(13): (S)-2-amino-3-(benzo[b]thiophen-3-yl)propanoic acid
  C-term amino
XDXXDXAAFNXXXT

SEQ ID NO: 657 - protein, 14 aa, Artificial Sequence
  Description of Artificial Sequence: Synthetic peptide
  N-term Acetic Acid
  MOD_RES (1)..(1): (R)-2-allylpyrrolidine-2-carboxylic acid
  MOD_RES (3)..(3): (S)-2-amino-4,4-dimethylpentanoic acid
  MOD_RES (4)..(4): 2-amino-2-(pent-4-en-1-yl)hept-6-enoic acid
  MOD_RES (6)..(6): (S)-2-amino-3-((carboxymethyl)(2,2,2-trifluoroethyl)amino) propanoic acid
  MOD_RES (11)..(11): (S)-3-amino-1-((pent-4-en-1-yloxy)carbonyl)pyrrolidine-3- carboxylic acid
  MOD_RES (12)..(12): (S)-2-amino-3-(thiophen-3-yl)propanoic acid
  MOD_RES (13)..(13): (S)-2-amino-3-(benzo[b]thiophen-3-yl)propanoic acid
  C-term amino
XDXXDXAAFNXXXA

SEQ ID NO: 658 - protein, 14 aa, Artificial Sequence
  Description of Artificial Sequence: Synthetic peptide
  N-term Acetic Acid
  MOD_RES (1)..(1): (R)-2-allylpyrrolidine-2-carboxylic acid
  MOD_RES (3)..(3): (S)-2-amino-4,4-dimethylpentanoic acid
  MOD_RES (4)..(4): 2-amino-2-(pent-4-en-1-yl)hept-6-enoic acid
  MOD_RES (6)..(6): (S)-2-amino-3-((carboxymethyl)(2,2,2-trifluoroethyl)amino) propanoic acid
  MOD_RES (11)..(11): (S)-3-amino-1-((pent-4-en-1-yloxy)carbonyl)pyrrolidine-3- carboxylic acid
  MOD_RES (12)..(12): (S)-2-amino-3-(thiophen-3-yl)propanoic acid
  MOD_RES (13)..(13): (S)-2-amino-3-(benzo[b]thiophen-3-yl)propanoic acid
  C-term amino
XDXXDXAAFNXXXL

SEQ ID NO: 659 - protein, 14 aa, Artificial Sequence
  Description of Artificial Sequence: Synthetic peptide
  N-term Acetic Acid
  MOD_RES (1)..(1): (R)-2-allylpyrrolidine-2-carboxylic acid
  MOD_RES (3)..(3): (S)-2-amino-4,4-dimethylpentanoic acid
  MOD_RES (4)..(4): 2-amino-2-(pent-4-en-1-yl)hept-6-enoic acid
  MOD_RES (6)..(6): (S)-2-amino-3-((carboxymethyl)(2,2,2-trifluoroethyl)amino) propanoic acid
  MOD_RES (11)..(11): (S)-3-amino-1-((pent-4-en-1-yloxy)carbonyl)pyrrolidine-3- carboxylic acid
  MOD_RES (12)..(12): (S)-2-amino-3-(thiophen-3-yl)propanoic acid
  MOD_RES (13)..(13): (S)-2-amino-3-(benzo[b]thiophen-3-yl)propanoic acid
  MOD_RES (14)..(14): D-threonine
  C-term amino
XDXXDXAAFNXXXT

SEQ ID NO: 660 - protein, 14 aa, Artificial Sequence
  Description of Artificial Sequence: Synthetic peptide
  N-term Acetic Acid
  MOD_RES (1)..(1): (R)-2-allylpyrrolidine-2-carboxylic acid
  MOD_RES (3)..(3): (S)-2-amino-4,4-dimethylpentanoic acid
  MOD_RES (4)..(4): 2-amino-2-(pent-4-en-1-yl)hept-6-enoic acid
  MOD_RES (6)..(6): (S)-2-amino-3-((carboxymethyl)(2,2,2-trifluoroethyl)amino) propanoic acid
  MOD_RES (11)..(11): (S)-3-amino-1-((pent-4-en-1-yloxy)carbonyl)pyrrolidine-3- carboxylic acid
  MOD_RES (12)..(12): (S)-2-amino-3-(thiophen-3-yl)propanoic acid
  MOD_RES (13)..(13): (S)-2-amino-3-(benzo[b]thiophen-3-yl)propanoic acid
  MOD_RES (14)..(14): L-homoserine
  C-term amino
XDXXDXAAFNXXXS

SEQ ID NO: 661 - protein, 14 aa, Artificial Sequence
  Description of Artificial Sequence: Synthetic peptide
  N-term Acetic Acid
  MOD_RES (1)..(1): (R)-2-allylpyrrolidine-2-carboxylic acid
  MOD_RES (3)..(3): (S)-2-amino-4,4-dimethylpentanoic acid
  MOD_RES (4)..(4): 2-amino-2-(pent-4-en-1-yl)hept-6-enoic acid
  MOD_RES (6)..(6): (S)-2-amino-3-((carboxymethyl)(2,2,2-trifluoroethyl)amino) propanoic acid
  MOD_RES (11)..(11): (S)-3-amino-1-((pent-4-en-1-yloxy)carbonyl)pyrrolidine-3- carboxylic acid
  MOD_RES (12)..(12): (S)-2-amino-3-(thiophen-3-yl)propanoic acid
  MOD_RES (13)..(13): (S)-2-amino-3-(benzo[b]thiophen-3-yl)propanoic acid
  C-term amino
XDXXDXAAFNXXXY

SEQ ID NO: 662 - protein, 14 aa, Artificial Sequence
  Description of Artificial Sequence: Synthetic peptide
  N-term Acetic Acid
  MOD_RES (1)..(1): (R)-2-allylpyrrolidine-2-carboxylic acid
  MOD_RES (3)..(3): (S)-2-amino-4,4-dimethylpentanoic acid
  MOD_RES (4)..(4): 2-amino-2-(pent-4-en-1-yl)hept-6-enoic acid
  MOD_RES (6)..(6): (S)-2-amino-3-((carboxymethyl)(2,2,2-trifluoroethyl)amino) propanoic acid
  MOD_RES (11)..(11): (S)-3-amino-1-((pent-4-en-1-yloxy)carbonyl)pyrrolidine-3- carboxylic acid
  MOD_RES (12)..(12): (S)-2-amino-3-(thiophen-3-yl)propanoic acid
  MOD_RES (13)..(13): (S)-2-amino-3-(benzo[b]thiophen-3-yl)propanoic acid
  C-term amino
XDXXDXAAFSXXXS

SEQ ID NO: 663 - protein, 14 aa, Artificial Sequence
  Description of Artificial Sequence: Synthetic peptide
  N-term Acetic Acid
  MOD_RES (1)..(1): (R)-2-allylpyrrolidine-2-carboxylic acid
  MOD_RES (3)..(3): (S)-2-amino-4,4-dimethylpentanoic acid
  MOD_RES (4)..(4): 2-amino-2-(pent-4-en-1-yl)hept-6-enoic acid
  MOD_RES (6)..(6): (S)-2-amino-3-((carboxymethyl)(2,2,2-trifluoroethyl)amino) propanoic acid
  MOD_RES (11)..(11): (S)-3-amino-1-((pent-4-en-1-yloxy)carbonyl)pyrrolidine-3- carboxylic acid
  MOD_RES (12)..(12): (S)-2-amino-3-(thiophen-3-yl)propanoic acid
  MOD_RES (13)..(13): (S)-2-amino-3-(benzo[b]thiophen-3-yl)propanoic acid
  C-term amino
XDXXDXAAFTXXXS

SEQ ID NO: 664 - protein, 14 aa, Artificial Sequence
  Description of Artificial Sequence: Synthetic peptide
  N-term Acetic Acid
  MOD_RES (1)..(1): (R)-2-allylpyrrolidine-2-carboxylic acid
  MOD_RES (3)..(3): (S)-2-amino-4,4-dimethylpentanoic acid
  MOD_RES (4)..(4): 2-amino-2-(pent-4-en-1-yl)hept-6-enoic acid
  MOD_RES (6)..(6): (S)-2-amino-3-((carboxymethyl)(2,2,2-trifluoroethyl)amino) propanoic acid
  MOD_RES (10)..(10): L-homoserine
  MOD_RES (11)..(11): (S)-3-amino-1-((pent-4-en-1-yloxy)carbonyl)pyrrolidine-3- carboxylic acid
  MOD_RES (12)..(12): (S)-2-amino-3-(thiophen-3-yl)propanoic acid
  MOD_RES (13)..(13): (S)-2-amino-3-(benzo[b]thiophen-3-yl)propanoic acid
  C-term amino
XDXXDXAAFSXXXS

SEQ ID NO: 665 - protein, 14 aa, Artificial Sequence
  Description of Artificial Sequence: Synthetic peptide
  N-term Acetic Acid
  MOD_RES (1)..(1): (R)-2-allylpyrrolidine-2-carboxylic acid
  MOD_RES (3)..(3): (S)-2-amino-4,4-dimethylpentanoic acid
  MOD_RES (4)..(4): 2-amino-2-(pent-4-en-1-yl)hept-6-enoic acid
  MOD_RES (6)..(6): (S)-2-amino-3-((carboxymethyl)(2,2,2-trifluoroethyl)amino) propanoic acid
  MOD_RES (11)..(11): (S)-3-amino-1-((pent-4-en-1-yloxy)carbonyl)pyrrolidine-3- carboxylic acid
  MOD_RES (12)..(12): (S)-2-amino-3-(thiophen-3-yl)propanoic acid
  MOD_RES (13)..(13): (S)-2-amino-3-(benzo[b]thiophen-3-yl)propanoic acid
  C-term amino
XDXXDXAAFLXXXS

SEQ ID NO: 666 - protein, 14 aa, Artificial Sequence
  Description of Artificial Sequence: Synthetic peptide
  N-term Acetic Acid
  MOD_RES (1)..(1): (R)-2-allylpyrrolidine-2-carboxylic acid
  MOD_RES (3)..(3): (S)-2-amino-4,4-dimethylpentanoic acid
  MOD_RES (4)..(4): 2-amino-2-(pent-4-en-1-yl)hept-6-enoic acid
  MOD_RES (6)..(6): (S)-2-amino-3-((carboxymethyl)(2,2,2-trifluoroethyl)amino) propanoic acid
  MOD_RES (11)..(11): (S)-3-amino-1-((pent-4-en-1-yloxy)carbonyl)pyrrolidine-3- carboxylic acid
  MOD_RES (12)..(12): (S)-2-amino-3-(thiophen-3-yl)propanoic acid
  MOD_RES (13)..(13): (S)-2-amino-3-(benzo[b]thiophen-3-yl)propanoic acid
  C-term amino
XDXXDXAAFFXXXS

SEQ ID NO: 667 - protein, 14 aa, Artificial Sequence
  Description of Artificial Sequence: Synthetic peptide
  N-term Acetic Acid
  MOD_RES (1)..(1): (R)-2-allylpyrrolidine-2-carboxylic acid
  MOD_RES (3)..(3): (S)-2-amino-4,4-dimethylpentanoic acid
  MOD_RES (4)..(4): 2-amino-2-(pent-4-en-1-yl)hept-6-enoic acid
  MOD_RES (6)..(6): (S)-2-amino-3-((carboxymethyl)(ethyl)amino)propanoic acid
  MOD_RES (11)..(11): (S)-3-amino-1-((pent-4-en-1-yloxy)carbonyl)pyrrolidine-3- carboxylic acid
  MOD_RES (12)..(12): (S)-2-amino-3-(thiophen-3-yl)propanoic acid
  MOD_RES (13)..(13): (S)-2-amino-3-(benzo[b]thiophen-3-yl)propanoic acid
  C-term amino
XDXXDXAAFNXXXQ

SEQ ID NO: 668 - protein, 14 aa, Artificial Sequence
  Description of Artificial Sequence: Synthetic peptide
  N-term Acetic Acid
  MOD_RES (1)..(1): (R)-2-allylpyrrolidine-2-carboxylic acid
  MOD_RES (3)..(3): (S)-2-amino-4,4-dimethylpentanoic acid
  MOD_RES (4)..(4): 2-amino-2-(pent-4-en-1-yl)hept-6-enoic acid
  MOD_RES (6)..(6): (S)-2-amino-3-((carboxymethyl)(ethyl)amino)propanoic acid
  MOD_RES (11)..(11): (S)-3-amino-1-((pent-4-en-1-yloxy)carbonyl)pyrrolidine-3- carboxylic acid
  MOD_RES (12)..(12): (S)-2-amino-3-(thiophen-3-yl)propanoic acid
  MOD_RES (13)..(13): (S)-2-amino-3-(benzo[b]thiophen-3-yl)propanoic acid
  C-term amino
XDXXDXAAFSXXXQ

SEQ ID NO: 669 - protein, 14 aa, Artificial Sequence
  Description of Artificial Sequence: Synthetic peptide
  N-term Acetic Acid
  MOD_RES (1)..(1): (R)-2-allylpyrrolidine-2-carboxylic acid
  MOD_RES (3)..(3): (S)-2-amino-4,4-dimethylpentanoic acid
  MOD_RES (4)..(4): 2-amino-2-(pent-4-en-1-yl)hept-6-enoic acid
  MOD_RES (6)..(6): (S)-2-amino-3-((carboxymethyl)(ethyl)amino)propanoic acid
  MOD_RES (11)..(11): (S)-3-amino-1-((pent-4-en-1-yloxy)carbonyl)pyrrolidine-3- carboxylic acid
  MOD_RES (12)..(12): (S)-2-amino-3-(thiophen-3-yl)propanoic acid
  MOD_RES (13)..(13): (S)-2-amino-3-(benzo[b]thiophen-3-yl)propanoic acid
  C-term amino
XDXXDXAAFTXXXQ

SEQ ID NO: 670 - protein, 14 aa, Artificial Sequence
  Description of Artificial Sequence: Synthetic peptide
  N-term Acetic Acid
  MOD_RES (1)..(1): (R)-2-allylpyrrolidine-2-carboxylic acid
  MOD_RES (3)..(3): (S)-2-amino-4,4-dimethylpentanoic acid
  MOD_RES (4)..(4): 2-amino-2-(pent-4-en-1-yl)hept-6-enoic acid
  MOD_RES (6)..(6): (S)-2-amino-3-((carboxymethyl)(ethyl)amino)propanoic acid
  MOD_RES (11)..(11): (S)-3-amino-1-((pent-4-en-1-yloxy)carbonyl)pyrrolidine-3- carboxylic acid
  MOD_RES (12)..(12): (S)-2-amino-3-(thiophen-3-yl)propanoic acid
  MOD_RES (13)..(13): (S)-2-amino-3-(benzo[b]thiophen-3-yl)propanoic acid
  C-term amino
XDXXDXAAFFXXXQ

SEQ ID NO: 671 - protein, 14 aa, Artificial Sequence
  Description of Artificial Sequence: Synthetic peptide
  N-term Acetic Acid
  MOD_RES (1)..(1): (R)-2-allylpyrrolidine-2-carboxylic acid
  MOD_RES (3)..(3): (S)-2-amino-4,4-dimethylpentanoic acid
  MOD_RES (4)..(4): 2-amino-2-(pent-4-en-1-yl)hept-6-enoic acid
  MOD_RES (6)..(6): (S)-2-amino-3-((carboxymethyl)(ethyl)amino)propanoic acid
  MOD_RES (11)..(11): (S)-3-amino-1-((pent-4-en-1-yloxy)carbonyl)pyrrolidine-3- carboxylic acid
  MOD_RES (12)..(12): (S)-2-amino-3-(thiophen-3-yl)propanoic acid
  MOD_RES (13)..(13): (S)-2-amino-3-(benzo[b]thiophen-3-yl)propanoic acid
  C-term amino
XDXXDXAAFLXXXQ

SEQ ID NO: 672 - protein, 14 aa, Artificial Sequence
  Description of Artificial Sequence: Synthetic peptide
  N-term Acetic Acid
  MOD_RES (1)..(1): (R)-2-allylpyrrolidine-2-carboxylic acid
  MOD_RES (3)..(3): (S)-2-amino-4,4-dimethylpentanoic acid
  MOD_RES (4)..(4): 2-amino-2-(pent-4-en-1-yl)hept-6-enoic acid
  MOD_RES (6)..(6): (S)-2-amino-3-((carboxymethyl)(ethyl)amino)propanoic acid
  MOD_RES (11)..(11): (S)-3-amino-1-((pent-4-en-1-yloxy)carbonyl)pyrrolidine-3- carboxylic acid
  MOD_RES (12)..(12): (S)-2-amino-3-(thiophen-3-yl)propanoic acid
  MOD_RES (13)..(13): (S)-2-amino-3-(benzo[b]thiophen-3-yl)propanoic acid
  C-term amino
XDXXDXAAFSXXXS

SEQ ID NO: 673 - protein, 14 aa, Artificial Sequence
  Description of Artificial Sequence: Synthetic peptide
  N-term Acetic Acid
  MOD_RES (1)..(1): (R)-2-allylpyrrolidine-2-carboxylic acid
  MOD_RES (3)..(3): (S)-2-amino-4,4-dimethylpentanoic acid
  MOD_RES (4)..(4): 2-amino-2-(pent-4-en-1-yl)hept-6-enoic acid
  MOD_RES (6)..(6): (S)-3-(2-amino-2-carboxyethyl)benzoic acid
  MOD_RES (11)..(11): (S)-3-amino-1-((pent-4-en-1-yloxy)carbonyl)pyrrolidine-3- carboxylic acid
  MOD_RES (12)..(12): (S)-2-amino-3-(thiophen-3-yl)propanoic acid
  MOD_RES (13)..(13): (S)-2-amino-3-(benzo[b]thiophen-3-yl)propanoic acid
  C-term amino
XDXXDXAAFNXXXQ

SEQ ID NO: 674 - protein, 14 aa, Artificial Sequence
  Description of Artificial Sequence: Synthetic peptide
  N-term Acetic Acid
  MOD_RES (1)..(1): (R)-2-allylpyrrolidine-2-carboxylic acid
  MOD_RES (3)..(3): (S)-2-amino-4,4-dimethylpentanoic acid
  MOD_RES (4)..(4): 2-amino-2-(pent-4-en-1-yl)hept-6-enoic acid
  MOD_RES (6)..(6): (S)-3-(2-amino-2-carboxyethyl)benzoic acid
  MOD_RES (11)..(11): (S)-3-amino-1-((pent-4-en-1-yloxy)carbonyl)pyrrolidine-3- carboxylic acid
  MOD_RES (12)..(12): (S)-2-amino-3-(thiophen-3-yl)propanoic acid
  MOD_RES (13)..(13): (S)-2-amino-3-(benzo[b]thiophen-3-yl)propanoic acid
  C-term amino
XDXXDXAAFSXXXQ

SEQ ID NO: 675 - protein, 14 aa, Artificial Sequence
  Description of Artificial Sequence: Synthetic peptide
  N-term Acetic Acid
  MOD_RES (1)..(1): (R)-2-allylpyrrolidine-2-carboxylic acid
  MOD_RES (3)..(3): (S)-2-amino-4,4-dimethylpentanoic acid
  MOD_RES (4)..(4): 2-amino-2-(pent-4-en-1-yl)hept-6-enoic acid
  MOD_RES (6)..(6): (S)-3-(2-amino-2-carboxyethyl)benzoic acid
  MOD_RES (11)..(11): (S)-3-amino-1-((pent-4-en-1-yloxy)carbonyl)pyrrolidine-3- carboxylic acid
  MOD_RES (12)..(12): (S)-2-amino-3-(thiophen-3-yl)propanoic acid
  MOD_RES (13)..(13): (S)-2-amino-3-(benzo[b]thiophen-3-yl)propanoic acid
  C-term amino
XDXXDXAAFTXXXQ

SEQ ID NO: 676 - protein, 14 aa, Artificial Sequence
  Description of Artificial Sequence: Synthetic peptide
  N-term Acetic Acid
  MOD_RES (1)..(1): (R)-2-allylpyrrolidine-2-carboxylic acid
  MOD_RES (3)..(3): (S)-2-amino-4,4-dimethylpentanoic acid
  MOD_RES (4)..(4): 2-amino-2-(pent-4-en-1-yl)hept-6-enoic acid
  MOD_RES (6)..(6): (S)-3-(2-amino-2-carboxyethyl)benzoic acid
  MOD_RES (11)..(11): (S)-3-amino-1-((pent-4-en-1-yloxy)carbonyl)pyrrolidine-3- carboxylic acid
  MOD_RES (12)..(12): (S)-2-amino-3-(thiophen-3-yl)propanoic acid
  MOD_RES (13)..(13): (S)-2-amino-3-(benzo[b]thiophen-3-yl)propanoic acid
  C-term amino
XDXXDXAAFFXXXS

SEQ ID NO: 677 - protein, 14 aa, Artificial Sequence
  Description of Artificial Sequence: Synthetic peptide
  N-term Acetic Acid
  MOD_RES (1)..(1): (R)-2-allylpyrrolidine-2-carboxylic acid
  MOD_RES (3)..(3): (S)-2-amino-4,4-dimethylpentanoic acid
  MOD_RES (4)..(4): 2-amino-2-(pent-4-en-1-yl)hept-6-enoic acid
  MOD_RES (6)..(6): (S)-3-(2-amino-2-carboxyethyl)benzoic acid
  MOD_RES (11)..(11): (S)-3-amino-1-((pent-4-en-1-yloxy)carbonyl)pyrrolidine-3- carboxylic acid
  MOD_RES (12)..(12): (S)-2-amino-3-(thiophen-3-yl)propanoic acid
  MOD_RES (13)..(13): (S)-2-amino-3-(benzo[b]thiophen-3-yl)propanoic acid
  C-term amino
XDXXDXAAFSXXXS

SEQ ID NO: 678 - protein, 14 aa, Artificial Sequence
  Description of Artificial Sequence: Synthetic peptide
  N-term Acetic Acid
  MOD_RES (1)..(1): (R)-2-allylpyrrolidine-2-carboxylic acid
  MOD_RES (3)..(3): (S)-2-amino-4,4-dimethylpentanoic acid
  MOD_RES (4)..(4): 2-amino-2-(pent-4-en-1-yl)hept-6-enoic acid
  MOD_RES (6)..(6): (S)-3-(2-amino-2-carboxyethyl)benzoic acid
  MOD_RES (11)..(11): (S)-3-amino-1-((pent-4-en-1-yloxy)carbonyl)pyrrolidine-3- carboxylic acid
  MOD_RES (12)..(12): (S)-2-amino-3-(thiophen-3-yl)propanoic acid
  MOD_RES (13)..(13): (S)-2-amino-3-(benzo[b]thiophen-3-yl)propanoic acid
  C-term amino
XDXXDXAAFLXXXS

SEQ ID NO: 679 - protein, 14 aa, Artificial Sequence
  Description of Artificial Sequence: Synthetic peptide
  N-term Acetic Acid
  MOD_RES (1)..(1): (R)-2-allylpyrrolidine-2-carboxylic acid
  MOD_RES (3)..(3): (S)-2-amino-4,4-dimethylpentanoic acid
  MOD_RES (4)..(4): 2-amino-2-(pent-4-en-1-yl)hept-6-enoic acid
  MOD_RES (6)..(6): (S)-2-amino-3-((carboxymethyl)(2,2,2-trifluoroethyl)amino) propanoic acid
  MOD_RES (11)..(11): (S)-3-amino-1-((pent-4-en-1-yloxy)carbonyl)pyrrolidine-3- carboxylic acid
  MOD_RES (13)..(13): (S)-2-amino-3-(benzo[b]thiophen-3-yl)propanoic acid
  C-term amino
XDXXDXAAFFXFXQ

SEQ ID NO: 680 - protein, 14 aa, Artificial Sequence
  Description of Artificial Sequence: Synthetic peptide
  N-term Acetic Acid
  MOD_RES (1)..(1): (R)-2-allylpyrrolidine-2-carboxylic acid
  MOD_RES (3)..(3): (S)-2-amino-4,4-dimethylpentanoic acid
  MOD_RES (4)..(4): 2-amino-2-(pent-4-en-1-yl)hept-6-enoic acid
  MOD_RES (6)..(6): (S)-2-amino-3-((carboxymethyl)(2,2,2-trifluoroethyl)amino) propanoic acid
  MOD_RES (11)..(11): (S)-3-amino-1-((pent-4-en-1-yloxy)carbonyl)pyrrolidine-3- carboxylic acid
  MOD_RES (13)..(13): (S)-2-amino-3-(benzo[b]thiophen-3-yl)propanoic acid
  C-term amino
XDXXDXAAFFXYXQ

SEQ ID NO: 681 - protein, 14 aa, Artificial Sequence
  Description of Artificial Sequence: Synthetic peptide
  N-term Acetic Acid
  MOD_RES (1)..(1): (R)-2-allylpyrrolidine-2-carboxylic acid
  MOD_RES (3)..(3): (S)-2-amino-4,4-dimethylpentanoic acid
  MOD_RES (4)..(4): 2-amino-2-(pent-4-en-1-yl)hept-6-enoic acid
  MOD_RES (6)..(6): (S)-2-amino-3-((carboxymethyl)(2,2,2-trifluoroethyl)amino) propanoic acid
  MOD_RES (11)..(11): (S)-3-amino-1-((pent-4-en-1-yloxy)carbonyl)pyrrolidine-3- carboxylic acid
  MOD_RES (12)..(12): (S)-2-amino-3-(2-chlorophenyl)propanoic acid
  MOD_RES (13)..(13): (S)-2-amino-3-(benzo[b]thiophen-3-yl)propanoic acid
  C-term amino
XDXXDXAAFFXFXS

SEQ ID NO: 682 - protein, 14 aa, Artificial Sequence
  Description of Artificial Sequence: Synthetic peptide
  N-term Acetic Acid
  MOD_RES (1)..(1): (R)-2-allylpyrrolidine-2-carboxylic acid
  MOD_RES (3)..(3): (S)-2-amino-4,4-dimethylpentanoic acid
  MOD_RES (4)..(4): 2-amino-2-(pent-4-en-1-yl)hept-6-enoic acid
  MOD_RES (6)..(6): (S)-2-amino-3-((carboxymethyl)(2,2,2-trifluoroethyl)amino) propanoic acid
  MOD_RES (11)..(11): (S)-3-amino-1-((pent-4-en-1-yloxy)carbonyl)pyrrolidine-3- carboxylic acid
  MOD_RES (12)..(12): (S)-2-amino-3-(2-chlorophenyl)propanoic acid
  MOD_RES (13)..(13): (S)-2-amino-3-(benzo[b]thiophen-3-yl)propanoic acid
  C-term amino
XDXXDXAAFFXFXT

SEQ ID NO: 683 - protein, 14 aa, Artificial Sequence
  Description of Artificial Sequence: Synthetic peptide
  N-term Acetic Acid
  MOD_RES (1)..(1): (R)-2-allylpyrrolidine-2-carboxylic acid
  MOD_RES (3)..(3): (S)-2-amino-4,4-dimethylpentanoic acid
  MOD_RES (4)..(4): 2-amino-2-(pent-4-en-1-yl)hept-6-enoic acid
  MOD_RES (6)..(6): (S)-2-amino-3-((carboxymethyl)(2,2,2-trifluoroethyl)amino) propanoic acid
  MOD_RES (11)..(11): (S)-3-amino-1-((pent-4-en-1-yloxy)carbonyl)pyrrolidine-3- carboxylic acid
  MOD_RES (12)..(12): (S)-2-amino-3-(2-chlorophenyl)propanoic acid
  MOD_RES (13)..(13): (S)-2-amino-3-(benzo[b]thiophen-3-yl)propanoic acid
  MOD_RES (14)..(14): L-homoserine
  C-term amino
XDXXDXAAFFXFXS

SEQ ID NO: 684 - protein, 14 aa, Artificial Sequence
  Description of Artificial Sequence: Synthetic peptide
  N-term Acetic Acid
  MOD_RES (1)..(1): (R)-2-allylpyrrolidine-2-carboxylic acid
  MOD_RES (3)..(3): (S)-2-amino-4,4-dimethylpentanoic acid
  MOD_RES (4)..(4): 2-amino-2-(pent-4-en-1-yl)hept-6-enoic acid
  MOD_RES (6)..(6): (S)-2-amino-3-((carboxymethyl)(2,2,2-trifluoroethyl)amino) propanoic acid
  MOD_RES (10)..(10): L-homoserine
  MOD_RES (11)..(11): (S)-3-amino-1-((pent-4-en-1-yloxy)carbonyl)pyrrolidine-3- carboxylic acid
  MOD_RES (12)..(12): (S)-2-amino-3-(2-chlorophenyl)propanoic acid
  MOD_RES (13)..(13): (S)-2-amino-3-(benzo[b]thiophen-3-yl)propanoic acid
  MOD_RES (14)..(14): L-homoserine
  C-term amino
XDXXDXAAFSXFXS

SEQ ID NO: 685 - protein, 14 aa, Artificial Sequence
  Description of Artificial Sequence: Synthetic peptide
  N-term Acetic Acid
  MOD_RES (1)..(1): (R)-2-allylpyrrolidine-2-carboxylic acid
  MOD_RES (3)..(3): (S)-2-amino-4,4-dimethylpentanoic acid
  MOD_RES (4)..(4): 2-amino-2-(pent-4-en-1-yl)hept-6-enoic acid
  MOD_RES (6)..(6): (S)-2-amino-3-((carboxymethyl)(2,2,2-trifluoroethyl)amino) propanoic acid
  MOD_RES (11)..(11): (S)-2-amino-2-methyldec-9-enoic acid
  MOD_RES (12)..(12): (S)-2-amino-3-(2-chlorophenyl)propanoic acid
  MOD_RES (13)..(13): (S)-2-amino-3-(benzo[b]thiophen-3-yl)propanoic acid
  C-term amino
XDXXDXAAFLXFXQ

SEQ ID NO: 686 - protein, 14 aa, Artificial Sequence
  Description of Artificial Sequence: Synthetic peptide
  N-term Acetic Acid
  MOD_RES (1)..(1): (R)-2-allylpyrrolidine-2-carboxylic acid
  MOD_RES (3)..(3): (S)-2-amino-4,4-dimethylpentanoic acid
  MOD_RES (4)..(4): 2-amino-2-(pent-4-en-1-yl)hept-6-enoic acid
  MOD_RES (6)..(6): (S)-2-amino-3-((carboxymethyl)(2,2,2-trifluoroethyl)amino) propanoic acid
  MOD_RES (11)..(11): (S)-2-amino-2-methyldec-9-enoic acid
  MOD_RES (12)..(12): (S)-2-amino-3-(2-chlorophenyl)propanoic acid
  MOD_RES (13)..(13): (S)-2-amino-3-(benzo[b]thiophen-3-yl)propanoic acid
  C-term amino
XDXXDXAAFSXFXQ

SEQ ID NO: 687 - protein, 14 aa, Artificial Sequence
  Description of Artificial Sequence: Synthetic peptide
  N-term Acetic Acid
  MOD_RES (1)..(1): (R)-2-allylpyrrolidine-2-carboxylic acid
  MOD_RES (3)..(3): (S)-2-amino-4,4-dimethylpentanoic acid
  MOD_RES (4)..(4): 2-amino-2-(pent-4-en-1-yl)hept-6-enoic acid
  MOD_RES (6)..(6): (S)-2-amino-3-((carboxymethyl)(2,2,2-trifluoroethyl)amino) propanoic acid
  MOD_RES (10)..(10): L-homoserine
  MOD_RES (11)..(11): (S)-2-amino-2-methyldec-9-enoic acid
  MOD_RES (12)..(12): (S)-2-amino-3-(2-chlorophenyl)propanoic acid
  MOD_RES (13)..(13): (S)-2-amino-3-(benzo[b]thiophen-3-yl)propanoic acid
  C-term amino
XDXXDXAAFSXFXQ

SEQ ID NO: 688 - protein, 14 aa, Artificial Sequence
  Description of Artificial Sequence: Synthetic peptide
  N-term Acetic Acid
  MOD_RES (1)..(1): (R)-2-allylpyrrolidine-2-carboxylic acid
  MOD_RES (3)..(3): (S)-2-amino-4,4-dimethylpentanoic acid
  MOD_RES (4)..(4): 2-amino-2-(pent-4-en-1-yl)hept-6-enoic acid
  MOD_RES (6)..(6): (S)-2-amino-3-((carboxymethyl)(2,2,2-trifluoroethyl)amino) propanoic acid
  MOD_RES (11)..(11): (S)-2-amino-2-methyldec-9-enoic acid
  MOD_RES (12)..(12): (S)-2-amino-3-(2-chlorophenyl)propanoic acid
  MOD_RES (13)..(13): (S)-2-amino-3-(benzo[b]thiophen-3-yl)propanoic acid
  MOD_RES (14)..(14): L-homoserine
  C-term amino
XDXXDXAAFLXFXS

SEQ ID NO: 689 - protein, 14 aa, Artificial Sequence
  Description of Artificial Sequence: Synthetic peptide
  N-term Acetic Acid
  MOD_RES (1)..(1): (R)-2-allylpyrrolidine-2-carboxylic acid
  MOD_RES (3)..(3): (S)-2-amino-4,4-dimethylpentanoic acid
  MOD_RES (4)..(4): 2-amino-2-(pent-4-en-1-yl)hept-6-enoic acid
  MOD_RES (6)..(6): (S)-2-amino-3-((carboxymethyl)(2,2,2-trifluoroethyl)amino) propanoic acid
  MOD_RES (11)..(11): (S)-2-amino-2-methyldec-9-enoic acid
  MOD_RES (12)..(12): (S)-2-amino-3-(2-chlorophenyl)propanoic acid
  MOD_RES (13)..(13): (S)-2-amino-3-(benzo[b]thiophen-3-yl)propanoic acid
  MOD_RES (14)..(14): L-homoserine
  C-term amino
XDXXDXAAFSXFXS

SEQ ID NO: 690 - protein, 14 aa, Artificial Sequence
  Description of Artificial Sequence: Synthetic peptide
  N-term Acetic Acid
  MOD_RES (1)..(1): (R)-2-allylpyrrolidine-2-carboxylic acid
  MOD_RES (3)..(3): (S)-2-amino-4,4-dimethylpentanoic acid
  MOD_RES (4)..(4): 2-amino-2-(pent-4-en-1-yl)hept-6-enoic acid
  MOD_RES (6)..(6): (S)-2-amino-3-((carboxymethyl)(2,2,2-trifluoroethyl)amino) propanoic acid
  MOD_RES (10)..(10): L-homoserine
  MOD_RES (11)..(11): (S)-2-amino-2-methyldec-9-enoic acid
  MOD_RES (12)..(12): (S)-2-amino-3-(2-chlorophenyl)propanoic acid
  MOD_RES (13)..(13): (S)-2-amino-3-(benzo[b]thiophen-3-yl)propanoic acid
  MOD_RES (14)..(14): L-homoserine
  C-term amino
XDXXDXAAFSXFXS

SEQ ID NO: 691 - protein, 14 aa, Artificial Sequence
  Description of Artificial Sequence: Synthetic peptide
  N-term Acetic Acid
  MOD_RES (1)..(1): (R)-2-allylpyrrolidine-2-carboxylic acid
  MOD_RES (3)..(3): (S)-2-amino-4,4-dimethylpentanoic acid
  MOD_RES (4)..(4): 2-amino-2-(pent-4-en-1-yl)hept-6-enoic acid
  MOD_RES (5)..(5): (S)-2-amino-3-(thiophen-3-yl)propanoic acid
  MOD_RES (6)..(6): (S)-2-amino-3-((carboxymethyl)(2,2,2-trifluoroethyl)amino) propanoic acid
  MOD_RES (11)..(11): (S)-3-amino-1-((pent-4-en-1-yloxy)carbonyl)pyrrolidine-3- carboxylic acid
  MOD_RES (13)..(13): (S)-2-amino-3-(benzo[b]thiophen-3-yl)propanoic acid
  C-term amino
XDXXXXAAFNXDXQ

SEQ ID NO: 692 - protein, 14 aa, Artificial Sequence
  Description of Artificial Sequence: Synthetic peptide
  N-term Acetic Acid
  MOD_RES (1)..(1): (R)-2-allylpyrrolidine-2-carboxylic acid
  MOD_RES (3)..(3): (S)-2-amino-4,4-dimethylpentanoic acid
  MOD_RES (4)..(4): 2-amino-2-(pent-4-en-1-yl)hept-6-enoic acid
  MOD_RES (6)..(6): (S)-2-amino-3-((carboxymethyl)(2,2,2-trifluoroethyl)amino) propanoic acid
  MOD_RES (11)..(11): (S)-3-amino-1-((pent-4-en-1-yloxy)carbonyl)pyrrolidine-3- carboxylic acid
  MOD_RES (12)..(12): (S)-2-amino-3-(2-chlorophenyl)propanoic acid
  MOD_RES (13)..(13): (S)-2-amino-3-(benzo[b]thiophen-3-yl)propanoic acid
  C-term amino
XDXXDXALFNXFXQ

SEQ ID NO: 693 - protein, 14 aa, Artificial Sequence
  Description of Artificial Sequence: Synthetic peptide
  N-term Acetic Acid
  MOD_RES (1)..(1): (R)-2-allylpyrrolidine-2-carboxylic acid
  MOD_RES (3)..(3): (S)-2-amino-4,4-dimethylpentanoic acid
  MOD_RES (4)..(4): 2-amino-2-(pent-4-en-1-yl)hept-6-enoic acid
  MOD_RES (6)..(6): (S)-2-amino-3-((carboxymethyl)(2,2,2-trifluoroethyl)amino) propanoic acid
  MOD_RES (11)..(11): (S)-3-amino-1-((pent-4-en-1-yloxy)carbonyl)pyrrolidine-3- carboxylic acid
  MOD_RES (12)..(12): (S)-2-amino-3-(2-chlorophenyl)propanoic acid
  MOD_RES (13)..(13): (S)-2-amino-3-(benzo[b]thiophen-3-yl)propanoic acid
  C-term amino
XDXXDXAFFNXFXQ

SEQ ID NO: 694 - protein, 14 aa, Artificial Sequence
  Description of Artificial Sequence: Synthetic peptide
  N-term Acetic Acid
  MOD_RES (1)..(1): (R)-2-allylpyrrolidine-2-carboxylic acid
  MOD_RES (3)..(3): (S)-2-amino-4,4-dimethylpentanoic acid
  MOD_RES (4)..(4): 2-amino-2-(pent-4-en-1-yl)hept-6-enoic acid
  MOD_RES (6)..(6): (S)-2-amino-3-((carboxymethyl)(2,2,2-trifluoroethyl)amino) propanoic acid
  MOD_RES (11)..(11): (S)-3-amino-1-((pent-4-en-1-yloxy)carbonyl)pyrrolidine-3- carboxylic acid
  MOD_RES (12)..(12): (S)-2-amino-3-(2-chlorophenyl)propanoic acid
  MOD_RES (13)..(13): (S)-2-amino-3-(benzo[b]thiophen-3-yl)propanoic acid
  C-term amino
XDXXDXASFNXFXQ

SEQ ID NO: 695 - protein, 14 aa, Artificial Sequence
  Description of Artificial Sequence: Synthetic peptide
  N-term Acetic Acid
  MOD_RES (1)..(1): (R)-2-allylpyrrolidine-2-carboxylic acid
  MOD_RES (3)..(3): (S)-2-amino-4,4-dimethylpentanoic acid
  MOD_RES (4)..(4): 2-amino-2-(pent-4-en-1-yl)hept-6-enoic acid
  MOD_RES (6)..(6): (S)-2-amino-3-((carboxymethyl)(2,2,2-trifluoroethyl)amino) propanoic acid
  MOD_RES (11)..(11): (S)-3-amino-1-((pent-4-en-1-yloxy)carbonyl)pyrrolidine-3- carboxylic acid
  MOD_RES (12)..(12): (S)-2-amino-3-(2-chlorophenyl)propanoic acid
  MOD_RES (13)..(13): (S)-2-amino-3-(benzo[b]thiophen-3-yl)propanoic acid
  C-term amino
XDXXDXAIFNXFXQ

SEQ ID NO: 696 - protein, 14 aa, Artificial Sequence
  Description of Artificial Sequence: Synthetic peptide
  N-term Acetic Acid
  MOD_RES (1)..(1): (R)-2-allylpyrrolidine-2-carboxylic acid
  MOD_RES (3)..(3): (S)-2-amino-4,4-dimethylpentanoic acid
  MOD_RES (4)..(4): 2-amino-2-(pent-4-en-1-yl)hept-6-enoic acid
  MOD_RES (6)..(6): (S)-2-amino-3-((carboxymethyl)(2,2,2-trifluoroethyl)amino) propanoic acid
  MOD_RES (11)..(11): (S)-3-amino-1-((pent-4-en-1-yloxy)carbonyl)pyrrolidine-3- carboxylic acid
  MOD_RES (12)..(12): (S)-2-amino-3-(2-chlorophenyl)propanoic acid
  MOD_RES (13)..(13): (S)-2-amino-3-(benzo[b]thiophen-3-yl)propanoic acid
  C-term amino
XDXXDXAKFNXFXQ

SEQ ID NO: 697 - protein, 14 aa, Artificial Sequence
  Description of Artificial Sequence: Synthetic peptide
  N-term Acetic Acid
  MOD_RES (1)..(1): (R)-2-allylpyrrolidine-2-carboxylic acid
  MOD_RES (3)..(3): (S)-2-amino-4,4-dimethylpentanoic acid
  MOD_RES (4)..(4): 2-amino-2-(pent-4-en-1-yl)hept-6-enoic acid
  MOD_RES (6)..(6): (S)-2-amino-3-((carboxymethyl)(2,2,2-trifluoroethyl)amino) propanoic acid
  MOD_RES (11)..(11): (S)-3-amino-1-((pent-4-en-1-yloxy)carbonyl)pyrrolidine-3- carboxylic acid
  MOD_RES (12)..(12): (S)-2-amino-3-(2-chlorophenyl)propanoic acid
  MOD_RES (13)..(13): (S)-2-amino-3-(benzo[b]thiophen-3-yl)propanoic acid
  C-term amino
XDXXDXLAFNXFXQ

SEQ ID NO: 698 - protein, 14 aa, Artificial Sequence
  Description of Artificial Sequence: Synthetic peptide
  N-term Acetic Acid
  MOD_RES (1)..(1): (R)-2-allylpyrrolidine-2-carboxylic acid
  MOD_RES (3)..(3): (S)-2-amino-4,4-dimethylpentanoic acid
  MOD_RES (4)..(4): 2-amino-2-(pent-4-en-1-yl)hept-6-enoic acid
  MOD_RES (6)..(6): (S)-2-amino-3-((carboxymethyl)(2,2,2-trifluoroethyl)amino) propanoic acid
  MOD_RES (11)..(11): (S)-3-amino-1-((pent-4-en-1-yloxy)carbonyl)pyrrolidine-3- carboxylic acid
  MOD_RES (12)..(12): (S)-2-amino-3-(2-chlorophenyl)propanoic acid
  MOD_RES (13)..(13): (S)-2-amino-3-(benzo[b]thiophen-3-yl)propanoic acid
  C-term amino
XDXXDXFAFNXFXQ

SEQ ID NO: 699 - protein, 14 aa, Artificial Sequence
  Description of Artificial Sequence: Synthetic peptide
  N-term Acetic Acid
  MOD_RES (1)..(1): (R)-2-allylpyrrolidine-2-carboxylic acid
  MOD_RES (3)..(3): (S)-2-amino-4,4-dimethylpentanoic acid
  MOD_RES (4)..(4): 2-amino-2-(pent-4-en-1-yl)hept-6-enoic acid
  MOD_RES (6)..(6): (S)-2-amino-3-((carboxymethyl)(2,2,2-trifluoroethyl)amino) propanoic acid
  MOD_RES (11)..(11): (S)-3-amino-1-((pent-4-en-1-yloxy)carbonyl)pyrrolidine-3- carboxylic acid
  MOD_RES (12)..(12): (S)-2-amino-3-(2-chlorophenyl)propanoic acid
  MOD_RES (13)..(13): (S)-2-amino-3-(benzo[b]thiophen-3-yl)propanoic acid
  C-term amino
XDXXDXSAFNXFXQ

SEQ ID NO: 700 - protein, 14 aa, Artificial Sequence
  Description of Artificial Sequence: Synthetic peptide
  N-term Acetic Acid
  MOD_RES (1)..(1): (R)-2-allylpyrrolidine-2-carboxylic acid
  MOD_RES (3)..(3): (S)-2-amino-4,4-dimethylpentanoic acid
  MOD_RES (4)..(4): 2-amino-2-(pent-4-en-1-yl)hept-6-enoic acid
  MOD_RES (6)..(6): (S)-2-amino-3-((carboxymethyl)(2,2,2-trifluoroethyl)amino) propanoic acid
  MOD_RES (11)..(11): (S)-3-amino-1-((pent-4-en-1-yloxy)carbonyl)pyrrolidine-3- carboxylic acid
  MOD_RES (12)..(12): (S)-2-amino-3-(2-chlorophenyl)propanoic acid
  MOD_RES (13)..(13): (S)-2-amino-3-(benzo[b]thiophen-3-yl)propanoic acid
  C-term amino
XDXXDXIAFNXFXQ

SEQ ID NO: 701 - protein, 14 aa, Artificial Sequence
  Description of Artificial Sequence: Synthetic peptide
  N-term Acetic Acid
  MOD_RES (1)..(1): (R)-2-allylpyrrolidine-2-carboxylic acid
  MOD_RES (3)..(3): (S)-2-amino-4,4-dimethylpentanoic acid
  MOD_RES (4)..(4): 2-amino-2-(pent-4-en-1-yl)hept-6-enoic acid
  MOD_RES (6)..(6): (S)-2-amino-3-((carboxymethyl)(2,2,2-trifluoroethyl)amino) propanoic acid
  MOD_RES (11)..(11): (S)-3-amino-1-((pent-4-en-1-yloxy)carbonyl)pyrrolidine-3- carboxylic acid
  MOD_RES (12)..(12): (S)-2-amino-3-(2-chlorophenyl)propanoic acid
  MOD_RES (13)..(13): (S)-2-amino-3-(benzo[b]thiophen-3-yl)propanoic acid
  C-term amino
XDXXDXKAFNXFXQ

SEQ ID NO: 702 - protein, 14 aa, Artificial Sequence
  Description of Artificial Sequence: Synthetic peptide
  N-term Acetic Acid
  MOD_RES (1)..(1): (R)-2-allylpyrrolidine-2-carboxylic acid
  MOD_RES (3)..(3): (S)-2-amino-4,4-dimethylpentanoic acid
  MOD_RES (4)..(4): 2-amino-2-(pent-4-en-1-yl)hept-6-enoic acid
  MOD_RES (6)..(6): (S)-2-amino-3-((carboxymethyl)(2,2,2-trifluoroethyl)amino) propanoic acid
  MOD_RES (11)..(11): (S)-3-amino-1-((pent-4-en-1-yloxy)carbonyl)pyrrolidine-3- carboxylic acid
  MOD_RES (12)..(12): (S)-2-amino-3-(2-chlorophenyl)propanoic acid
  MOD_RES (13)..(13): (S)-2-amino-3-(benzo[b]thiophen-3-yl)propanoic acid
  C-term hexane-1,6-diamine
XDXXDXAAFFXFXQ

SEQ ID NO: 703 - protein, 14 aa, Artificial Sequence
  Description of Artificial Sequence: Synthetic peptide
  N-term Acetic Acid
  MOD_RES (1)..(1): (R)-2-allylpyrrolidine-2-carboxylic acid
  MOD_RES (3)..(3): (S)-2-amino-4,4-dimethylpentanoic acid
  MOD_RES (4)..(4): 2-amino-2-(pent-4-en-1-yl)hept-6-enoic acid
  MOD_RES (11)..(11): (S)-3-amino-1-((pent-4-en-1-yloxy)carbonyl)pyrrolidine-3- carboxylic acid
  MOD_RES (12)..(12): (S)-2-amino-3-(2-chlorophenyl)propanoic acid
  MOD_RES (13)..(13): (S)-2-amino-3-(benzo[b]thiophen-3-yl)propanoic acid
  C-term amino
XDXXDDAAFTXFXQ

SEQ ID NO: 704 - protein, 14 aa, Artificial Sequence
  Description of Artificial Sequence: Synthetic peptide
  N-term Acetic Acid
  MOD_RES (1)..(1): (R)-2-allylpyrrolidine-2-carboxylic acid
  MOD_RES (3)..(3): (S)-2-amino-4,4-dimethylpentanoic acid
  MOD_RES (4)..(4): 2-amino-2-(pent-4-en-1-yl)hept-6-enoic acid
  MOD_RES (11)..(11): (S)-3-amino-1-((pent-4-en-1-yloxy)carbonyl)pyrrolidine-3- carboxylic acid
  MOD_RES (12)..(12): (S)-2-amino-3-(2-chlorophenyl)propanoic acid
  MOD_RES (13)..(13): (S)-2-amino-3-(benzo[b]thiophen-3-yl)propanoic acid
  C-term amino
XDXXDNAAFTXFXQ

SEQ ID NO: 705 - protein, 14 aa, Artificial Sequence
  Description of Artificial Sequence: Synthetic peptide
  N-term Acetic Acid
  MOD_RES (1)..(1): (R)-2-allylpyrrolidine-2-carboxylic acid
  MOD_RES (3)..(3): (S)-2-amino-4,4-dimethylpentanoic acid
  MOD_RES (4)..(4): 2-amino-2-(pent-4-en-1-yl)hept-6-enoic acid
  MOD_RES (11)..(11): (S)-3-amino-1-((pent-4-en-1-yloxy)carbonyl)pyrrolidine-3- carboxylic acid
  MOD_RES (12)..(12): (S)-2-amino-3-(2-chlorophenyl)propanoic acid
  MOD_RES (13)..(13): (S)-2-amino-3-(benzo[b]thiophen-3-yl)propanoic acid
  C-term amino
XDXXDDAAFTXFXS

SEQ ID NO: 706 - protein, 14 aa, Artificial Sequence
  Description of Artificial Sequence: Synthetic peptide
  N-term Acetic Acid
  MOD_RES (1)..(1): (R)-2-allylpyrrolidine-2-carboxylic acid
  MOD_RES (3)..(3): (S)-2-amino-4,4-dimethylpentanoic acid
  MOD_RES (4)..(4): 2-amino-2-(pent-4-en-1-yl)hept-6-enoic acid
  MOD_RES (11)..(11): (S)-3-amino-1-((pent-4-en-1-yloxy)carbonyl)pyrrolidine-3- carboxylic acid
  MOD_RES (12)..(12): (S)-2-amino-3-(2-chlorophenyl)propanoic acid
  MOD_RES (13)..(13): (S)-2-amino-3-(benzo[b]thiophen-3-yl)propanoic acid
  C-term amino
XDXXDNAAFTXFXS

SEQ ID NO: 707 - protein, 14 aa, Artificial Sequence
  Description of Artificial Sequence: Synthetic peptide
  N-term Acetic Acid
  MOD_RES (1)..(1): (R)-2-allylpyrrolidine-2-carboxylic acid
  MOD_RES (3)..(3): (S)-2-amino-4,4-dimethylpentanoic acid
  MOD_RES (4)..(4): 2-amino-2-(pent-4-en-1-yl)hept-6-enoic acid
  MOD_RES (11)..(11): (S)-3-amino-1-((pent-4-en-1-yloxy)carbonyl)pyrrolidine-3- carboxylic acid
  MOD_RES (12)..(12): (S)-2-amino-3-(2-chlorophenyl)propanoic acid
  MOD_RES (13)..(13): (S)-2-amino-3-(benzo[b]thiophen-3-yl)propanoic acid
  C-term amino
XDXXDDAAFSXFXQ

SEQ ID NO: 708 - protein, 14 aa, Artificial Sequence
  Description of Artificial Sequence: Synthetic peptide
  N-term Acetic Acid
  MOD_RES (1)..(1): (R)-2-allylpyrrolidine-2-carboxylic acid
  MOD_RES (3)..(3): (S)-2-amino-4,4-dimethylpentanoic acid
  MOD_RES (4)..(4): 2-amino-2-(pent-4-en-1-yl)hept-6-enoic acid
  MOD_RES (11)..(11): (S)-3-amino-1-((pent-4-en-1-yloxy)carbonyl)pyrrolidine-3- carboxylic acid
  MOD_RES (12)..(12): (S)-2-amino-3-(2-chlorophenyl)propanoic acid
  MOD_RES (13)..(13): (S)-2-amino-3-(benzo[b]thiophen-3-yl)propanoic acid
  C-term amino
XDXXDNAAFSXFXQ

SEQ ID NO: 709 - protein, 14 aa, Artificial Sequence
  Description of Artificial Sequence: Synthetic peptide
  N-term Acetic Acid
  MOD_RES (1)..(1): (R)-2-allylpyrrolidine-2-carboxylic acid
  MOD_RES (3)..(3): (S)-2-amino-4,4-dimethylpentanoic acid
  MOD_RES (4)..(4): 2-amino-2-(pent-4-en-1-yl)hept-6-enoic acid
  MOD_RES (11)..(11): (S)-3-amino-1-((pent-4-en-1-yloxy)carbonyl)pyrrolidine-3- carboxylic acid
  MOD_RES (12)..(12): (S)-2-amino-3-(2-chlorophenyl)propanoic acid
  MOD_RES (13)..(13): (S)-2-amino-3-(benzo[b]thiophen-3-yl)propanoic acid
  C-term amino
XDXXDDAAFSXFXS

SEQ ID NO: 710 - protein, 14 aa, Artificial Sequence
  Description of Artificial Sequence: Synthetic peptide
  N-term Acetic Acid
  MOD_RES (1)..(1): (R)-2-allylpyrrolidine-2-carboxylic acid
  MOD_RES (3)..(3): (S)-2-amino-4,4-dimethylpentanoic acid
  MOD_RES (4)..(4): 2-amino-2-(pent-4-en-1-yl)hept-6-enoic acid
  MOD_RES (11)..(11): (S)-3-amino-1-((pent-4-en-1-yloxy)carbonyl)pyrrolidine-3- carboxylic acid
  MOD_RES (12)..(12): (S)-2-amino-3-(2-chlorophenyl)propanoic acid
  MOD_RES (13)..(13): (S)-2-amino-3-(benzo[b]thiophen-3-yl)propanoic acid
  C-term amino
XDXXDNAAFSXFXS

SEQ ID NO: 711 - protein, 14 aa, Artificial Sequence
  Description of Artificial Sequence: Synthetic peptide
  N-term Acetic Acid
  MOD_RES (1)..(1): (R)-2-allylpyrrolidine-2-carboxylic acid
  MOD_RES (3)..(3): (S)-2-amino-4,4-dimethylpentanoic acid
  MOD_RES (4)..(4): 2-amino-2-(pent-4-en-1-yl)hept-6-enoic acid
  MOD_RES (11)..(11): (S)-3-amino-1-((pent-4-en-1-yloxy)carbonyl)pyrrolidine-3- carboxylic acid
  MOD_RES (12)..(12): (S)-2-amino-3-(2-fluorophenyl)propanoic acid
  MOD_RES (13)..(13): (S)-2-amino-3-(benzo[b]thiophen-3-yl)propanoic acid
  C-term amino
XDXXDDAAFTXFXQ

SEQ ID NO: 712 - protein, 14 aa, Artificial Sequence
  Description of Artificial Sequence: Synthetic peptide
  N-term Acetic Acid
  MOD_RES (1)..(1): (R)-2-allylpyrrolidine-2-carboxylic acid
  MOD_RES (3)..(3): (S)-2-amino-4,4-dimethylpentanoic acid
  MOD_RES (4)..(4): 2-amino-2-(pent-4-en-1-yl)hept-6-enoic acid
  MOD_RES (11)..(11): (S)-3-amino-1-((pent-4-en-1-yloxy)carbonyl)pyrrolidine-3- carboxylic acid
  MOD_RES (12)..(12): (S)-2-amino-3-(2-fluorophenyl)propanoic acid
  MOD_RES (13)..(13): (S)-2-amino-3-(benzo[b]thiophen-3-yl)propanoic acid
  C-term amino
XDXXDNAAFTXFXQ

SEQ ID NO: 713 - protein, 14 aa, Artificial Sequence
  Description of Artificial Sequence: Synthetic peptide
  N-term Acetic Acid
  MOD_RES (1)..(1): (R)-2-allylpyrrolidine-2-carboxylic acid
  MOD_RES (3)..(3): (S)-2-amino-4,4-dimethylpentanoic acid
  MOD_RES (4)..(4): 2-amino-2-(pent-4-en-1-yl)hept-6-enoic acid
  MOD_RES (11)..(11): (S)-3-amino-1-((pent-4-en-1-yloxy)carbonyl)pyrrolidine-3- carboxylic acid
  MOD_RES (12)..(12): (S)-2-amino-3-(2-fluorophenyl)propanoic acid
  MOD_RES (13)..(13): (S)-2-amino-3-(benzo[b]thiophen-3-yl)propanoic acid
  C-term amino
XDXXDDAAFTXFXS

SEQ ID NO: 714 - protein, 14 aa, Artificial Sequence
  Description of Artificial Sequence: Synthetic peptide
  N-term Acetic Acid
  MOD_RES (1)..(1): (R)-2-allylpyrrolidine-2-carboxylic acid
  MOD_RES (3)..(3): (S)-2-amino-4,4-dimethylpentanoic acid
  MOD_RES (4)..(4): 2-amino-2-(pent-4-en-1-yl)hept-6-enoic acid
  MOD_RES (11)..(11): (S)-3-amino-1-((pent-4-en-1-yloxy)carbonyl)pyrrolidine-3- carboxylic acid
  MOD_RES (12)..(12): (S)-2-amino-3-(2-fluorophenyl)propanoic acid
  MOD_RES (13)..(13): (S)-2-amino-3-(benzo[b]thiophen-3-yl)propanoic acid
  C-term amino
XDXXDNAAFTXFXS

SEQ ID NO: 715 - protein, 14 aa, Artificial Sequence
  Description of Artificial Sequence: Synthetic peptide
  N-term Acetic Acid
  MOD_RES (1)..(1): (R)-2-allylpyrrolidine-2-carboxylic acid
  MOD_RES (3)..(3): (S)-2-amino-4,4-dimethylpentanoic acid
  MOD_RES (4)..(4): 2-amino-2-(pent-4-en-1-yl)hept-6-enoic acid
  MOD_RES (11)..(11): (S)-3-amino-1-((pent-4-en-1-yloxy)carbonyl)pyrrolidine-3- carboxylic acid
  MOD_RES (12)..(12): (S)-2-amino-3-(thiophen-3-yl)propanoic acid
  MOD_RES (13)..(13): (S)-2-amino-3-(benzo[b]thiophen-3-yl)propanoic acid
  C-term hydroxyl
XDXXDDAAFNXXXQ

SEQ ID NO: 716 - protein, 14 aa, Artificial Sequence
  Description of Artificial Sequence: Synthetic peptide
  N-term Acetic Acid
  MOD_RES (1)..(1): (R)-2-allylpyrrolidine-2-carboxylic acid
  MOD_RES (3)..(3): (S)-2-amino-4,4-dimethylpentanoic acid
  MOD_RES (4)..(4): 2-amino-2-(pent-4-en-1-yl)hept-6-enoic acid
  MOD_RES (6)..(6): (S)-2-amino-3-((carboxymethyl)(2,2,2-trifluoroethyl)amino) propanoic acid
  MOD_RES (11)..(11): (S)-3-amino-1-((pent-4-en-1-yloxy)carbonyl)pyrrolidine-3- carboxylic acid
  MOD_RES (12)..(12): (S)-2-amino-3-(thiophen-3-yl)propanoic acid
  MOD_RES (13)..(13): (S)-2-amino-3-(benzo[b]thiophen-3-yl)propanoic acid
  C-term hydroxyl
XDXXDXAAFNXXXQ

SEQ ID NO: 717 - protein, 14 aa, Artificial Sequence
  Description of Artificial Sequence: Synthetic peptide
  N-term Acetic Acid
  MOD_RES (1)..(1): (R)-2-allylpyrrolidine-2-carboxylic acid
  MOD_RES (3)..(3): (S)-2-amino-4,4-dimethylpentanoic acid
  MOD_RES (4)..(4): 2-amino-2-(pent-4-en-1-yl)hept-6-enoic acid
  MOD_RES (11)..(11): (S)-3-amino-1-((pent-4-en-1-yloxy)carbonyl)pyrrolidine-3- carboxylic acid
  MOD_RES (12)..(12): (S)-2-amino-3-(thiophen-3-yl)propanoic acid
  MOD_RES (13)..(13): (S)-2-amino-3-(benzo[b]thiophen-3-yl)propanoic acid
  C-term hydroxyl
XFXXDDAADNXXXQ

SEQ ID NO: 718 - protein, 14 aa, Artificial Sequence
  Description of Artificial Sequence: Synthetic peptide
  N-term Acetic Acid
  MOD_RES (1)..(1): (R)-2-allylpyrrolidine-2-carboxylic acid
  MOD_RES (3)..(3): (S)-2-amino-4,4-dimethylpentanoic acid
  MOD_RES (4)..(4): 2-amino-2-(pent-4-en-1-yl)hept-6-enoic acid
  MOD_RES (11)..(11): (S)-3-amino-1-((pent-4-en-1-yloxy)carbonyl)pyrrolidine-3- carboxylic acid
  MOD_RES (12)..(12): (S)-2-amino-3-(2-chlorophenyl)propanoic acid
  MOD_RES (13)..(13): (S)-2-amino-3-(benzo[b]thiophen-3-yl)propanoic acid
  MOD_RES (14)..(14): D-threonine
  C-term amino
XDXXDDAAFNXFXT

SEQ ID NO: 719 - protein, 14 aa, Artificial Sequence
  Description of Artificial Sequence: Synthetic peptide
  N-term Acetic Acid
  MOD_RES (1)..(1): (R)-2-allylpyrrolidine-2-carboxylic acid
  MOD_RES (3)..(3): (S)-2-amino-4,4-dimethylpentanoic acid
  MOD_RES (4)..(4): 2-amino-2-(pent-4-en-1-yl)hept-6-enoic acid
  MOD_RES (11)..(11): (S)-3-amino-1-((pent-4-en-1-yloxy)carbonyl)pyrrolidine-3- carboxylic acid
  MOD_RES (12)..(12): (S)-2-amino-3-(2-chlorophenyl)propanoic acid
  MOD_RES (13)..(13): (S)-2-amino-3-(benzo[b]thiophen-3-yl)propanoic acid
  MOD_RES (14)..(14): D-threonine
  C-term amino
XEXXDDAAFNXFXT

SEQ ID NO: 720 - protein, 14 aa, Artificial Sequence
  Description of Artificial Sequence: Synthetic peptide
  N-term Acetic Acid
  MOD_RES (1)..(1): (R)-2-allylpyrrolidine-2-carboxylic acid
  MOD_RES (3)..(3): (S)-2-amino-4,4-dimethylpentanoic acid
  MOD_RES (4)..(4): 2-amino-2-(pent-4-en-1-yl)hept-6-enoic acid
  MOD_RES (11)..(11): (S)-3-amino-1-((pent-4-en-1-yloxy)carbonyl)pyrrolidine-3- carboxylic acid
  MOD_RES (12)..(12): (S)-2-amino-3-(2-chlorophenyl)propanoic acid
  MOD_RES (13)..(13): (S)-2-amino-3-(benzo[b]thiophen-3-yl)propanoic acid
  MOD_RES (14)..(14): D-threonine
  C-term amino
XDXXEDAAFNXFXT

SEQ ID NO: 721 - protein, 14 aa, Artificial Sequence
  Description of Artificial Sequence: Synthetic peptide
  N-term Acetic Acid
  MOD_RES (1)..(1): (R)-2-allylpyrrolidine-2-carboxylic acid
  MOD_RES (3)..(3): (S)-2-amino-4,4-dimethylpentanoic acid
  MOD_RES (4)..(4): 2-amino-2-(pent-4-en-1-yl)hept-6-enoic acid
  MOD_RES (11)..(11): (S)-3-amino-1-((pent-4-en-1-yloxy)carbonyl)pyrrolidine-3- carboxylic acid
  MOD_RES (12)..(12): (S)-2-amino-3-(2-chlorophenyl)propanoic acid
  MOD_RES (13)..(13): (S)-2-amino-3-(benzo[b]thiophen-3-yl)propanoic acid
  MOD_RES (14)..(14): D-threonine
  C-term amino
XDXXDEAAFNXFXT

SEQ ID NO: 722 - protein, 14 aa, Artificial Sequence
  Description of Artificial Sequence: Synthetic peptide
  N-term Acetic Acid
  MOD_RES (1)..(1): (R)-2-allylpyrrolidine-2-carboxylic acid
  MOD_RES (3)..(3): (S)-2-amino-4,4-dimethylpentanoic acid
  MOD_RES (4)..(4): 2-amino-2-(pent-4-en-1-yl)hept-6-enoic acid
  MOD_RES (11)..(11): (S)-3-amino-1-((pent-4-en-1-yloxy)carbonyl)pyrrolidine-3- carboxylic acid
  MOD_RES (12)..(12): (S)-2-amino-3-(2-chlorophenyl)propanoic acid
  MOD_RES (13)..(13): (S)-2-amino-3-(benzo[b]thiophen-3-yl)propanoic acid
  MOD_RES (14)..(14): D-threonine
  C-term amino
XDXXDDAAFSXFXT

SEQ ID NO: 723 - protein, 14 aa, Artificial Sequence
  Description of Artificial Sequence: Synthetic peptide
  N-term Acetic Acid
  MOD_RES (1)..(1): (R)-2-allylpyrrolidine-2-carboxylic acid
  MOD_RES (3)..(3): (S)-2-amino-4,4-dimethylpentanoic acid
  MOD_RES (4)..(4): 2-amino-2-(pent-4-en-1-yl)hept-6-enoic acid
  MOD_RES (11)..(11): (S)-3-amino-1-((pent-4-en-1-yloxy)carbonyl)pyrrolidine-3- carboxylic acid
  MOD_RES (12)..(12): (S)-2-amino-3-(2-chlorophenyl)propanoic acid
  MOD_RES (13)..(13): (S)-2-amino-3-(benzo[b]thiophen-3-yl)propanoic acid
  MOD_RES (14)..(14): D-threonine
  C-term amino
XDXXDDAAFTXFXT

SEQ ID NO: 724 - protein, 14 aa, Artificial Sequence
  Description of Artificial Sequence: Synthetic peptide
  N-term Acetic Acid
  MOD_RES (1)..(1): (R)-2-allylpyrrolidine-2-carboxylic acid
  MOD_RES (3)..(3): (S)-2-amino-4,4-dimethylpentanoic acid
  MOD_RES (4)..(4): 2-amino-2-(pent-4-en-1-yl)hept-6-enoic acid
  MOD_RES (11)..(11): (S)-3-amino-1-((pent-4-en-1-yloxy)carbonyl)pyrrolidine-3- carboxylic acid
  MOD_RES (12)..(12): (S)-2-amino-3-(2-chlorophenyl)propanoic acid
  MOD_RES (13)..(13): (S)-2-amino-3-(benzo[b]thiophen-3-yl)propanoic acid
  MOD_RES (14)..(14): D-threonine
  C-term amino
XDXXDDAAFFXFXT

SEQ ID NO: 725 - protein, 14 aa, Artificial Sequence
  Description of Artificial Sequence: Synthetic peptide
  N-term Acetic Acid
  MOD_RES (1)..(1): (R)-2-allylpyrrolidine-2-carboxylic acid
  MOD_RES (3)..(3): (S)-2-amino-4,4-dimethylpentanoic acid
  MOD_RES (4)..(4): 2-amino-2-(pent-4-en-1-yl)hept-6-enoic acid
  MOD_RES (11)..(11): (S)-3-amino-1-((pent-4-en-1-yloxy)carbonyl)pyrrolidine-3- carboxylic acid
  MOD_RES (12)..(12): (S)-2-amino-3-(2-chlorophenyl)propanoic acid
  MOD_RES (13)..(13): (S)-2-amino-3-(benzo[b]thiophen-3-yl)propanoic acid
  MOD_RES (14)..(14): D-threonine
  C-term amino
XDXXDDAAFLXFXT

SEQ ID NO: 726 - protein, 14 aa, Artificial Sequence
  Description of Artificial Sequence: Synthetic peptide
  N-term Acetic Acid
  MOD_RES (1)..(1): (R)-2-allylpyrrolidine-2-carboxylic acid
  MOD_RES (3)..(3): (S)-2-amino-4,4-dimethylpentanoic acid
  MOD_RES (4)..(4): 2-amino-2-(pent-4-en-1-yl)hept-6-enoic acid
  MOD_RES (11)..(11): (S)-3-amino-1-((pent-4-en-1-yloxy)carbonyl)pyrrolidine-3- carboxylic acid
  MOD_RES (12)..(12): (S)-2-amino-3-(2-chlorophenyl)propanoic acid
  MOD_RES (13)..(13): (S)-2-amino-3-(benzo[b]thiophen-3-yl)propanoic acid
  MOD_RES (14)..(14): D-threonine
  C-term amino
XDXXDEAAFSXFXT

SEQ ID NO: 727 - protein, 14 aa, Artificial Sequence
  Description of Artificial Sequence: Synthetic peptide
  N-term Acetic Acid
  MOD_RES (1)..(1): (R)-2-allylpyrrolidine-2-carboxylic acid
  MOD_RES (3)..(3): (S)-2-amino-4,4-dimethylpentanoic acid
  MOD_RES (4)..(4): 2-amino-2-(pent-4-en-1-yl)hept-6-enoic acid
  MOD_RES (11)..(11): (S)-3-amino-1-((pent-4-en-1-yloxy)carbonyl)pyrrolidine-3- carboxylic acid
  MOD_RES (12)..(12): (S)-2-amino-3-(2-chlorophenyl)propanoic acid
  MOD_RES (13)..(13): (S)-2-amino-3-(benzo[b]thiophen-3-yl)propanoic acid
  MOD_RES (14)..(14): D-threonine
  C-term amino
XDXXDEAAFTXFXT

SEQ ID NO: 728 - protein, 14 aa, Artificial Sequence
  Description of Artificial Sequence: Synthetic peptide
  N-term Acetic Acid
  MOD_RES (1)..(1): (R)-2-allylpyrrolidine-2-carboxylic acid
  MOD_RES (3)..(3): (S)-2-amino-4,4-dimethylpentanoic acid
  MOD_RES (4)..(4): 2-amino-2-(pent-4-en-1-yl)hept-6-enoic acid
  MOD_RES (11)..(11): (S)-3-amino-1-((pent-4-en-1-yloxy)carbonyl)pyrrolidine-3- carboxylic acid
  MOD_RES (12)..(12): (S)-2-amino-3-(2-chlorophenyl)propanoic acid
  MOD_RES (13)..(13): (S)-2-amino-3-(benzo[b]thiophen-3-yl)propanoic acid
  MOD_RES (14)..(14): D-threonine
  C-term amino
XDXXDEAAFFXFXT

SEQ ID NO: 729 - protein, 14 aa, Artificial Sequence
  Description of Artificial Sequence: Synthetic peptide
  N-term Acetic Acid
  MOD_RES (1)..(1): (R)-2-allylpyrrolidine-2-carboxylic acid
  MOD_RES (3)..(3): (S)-2-amino-4,4-dimethylpentanoic acid
  MOD_RES (4)..(4): 2-amino-2-(pent-4-en-1-yl)hept-6-enoic acid
  MOD_RES (11)..(11): (S)-3-amino-1-((pent-4-en-1-yloxy)carbonyl)pyrrolidine-3- carboxylic acid
  MOD_RES (12)..(12): (S)-2-amino-3-(2-chlorophenyl)propanoic acid
  MOD_RES (13)..(13): (S)-2-amino-3-(benzo[b]thiophen-3-yl)propanoic acid
  MOD_RES (14)..(14): D-threonine
  C-term amino
XDXXDEAAFLXFXT

SEQ ID NO: 730 - protein, 14 aa, Artificial Sequence
  Description of Artificial Sequence: Synthetic peptide
  N-term Acetic Acid
  MOD_RES (1)..(1): (R)-2-allylpyrrolidine-2-carboxylic acid
  MOD_RES (3)..(3): (S)-2-amino-3-cyclohexylpropanoic acid
  MOD_RES (4)..(4): 2-amino-2-(pent-4-en-1-yl)hept-6-enoic acid
  MOD_RES (11)..(11): (S)-3-amino-1-((pent-4-en-1-yloxy)carbonyl)pyrrolidine-3- carboxylic acid
  MOD_RES (12)..(12): (S)-2-amino-3-(2-chlorophenyl)propanoic acid
  MOD_RES (13)..(13): (S)-2-amino-3-(benzo[b]thiophen-3-yl)propanoic acid
  C-term amino
XDXXDDAAFNXFXQ

SEQ ID NO: 731 - protein, 14 aa, Artificial Sequence
  Description of Artificial Sequence: Synthetic peptide
  N-term Acetic Acid
  MOD_RES (1)..(1): (R)-2-allylpyrrolidine-2-carboxylic acid
  MOD_RES (4)..(4): 2-amino-2-(pent-4-en-1-yl)hept-6-enoic acid
  MOD_RES (11)..(11): (S)-3-amino-1-((pent-4-en-1-yloxy)carbonyl)pyrrolidine-3- carboxylic acid
  MOD_RES (12)..(12): (S)-2-amino-3-(2-chlorophenyl)propanoic acid
  MOD_RES (13)..(13): (S)-2-amino-3-(benzo[b]thiophen-3-yl)propanoic acid
  C-term amino
XDFXDDAAFNXFXQ

SEQ ID NO: 732 - protein, 14 aa, Artificial Sequence
  Description of Artificial Sequence: Synthetic peptide
  N-term Acetic Acid
  MOD_RES (1)..(1): (R)-2-allylpyrrolidine-2-carboxylic acid
  MOD_RES (3)..(3): (S)-2-amino-3-cyclohexylpropanoic acid
  MOD_RES (4)..(4): 2-amino-2-(pent-4-en-1-yl)hept-6-enoic acid
  MOD_RES (11)..(11): (S)-3-amino-1-((pent-4-en-1-yloxy)carbonyl)pyrrolidine-3- carboxylic acid
  MOD_RES (12)..(12): (S)-2-amino-3-(2-chlorophenyl)propanoic acid
  MOD_RES (13)..(13): (S)-2-amino-3-(benzo[b]thiophen-3-yl)propanoic acid
  C-term amino
XDXXDDAAFTXFXQ

SEQ ID NO: 733 - protein, 14 aa, Artificial Sequence
  Description of Artificial Sequence: Synthetic peptide
  N-term Acetic Acid
  MOD_RES (1)..(1): (R)-2-allylpyrrolidine-2-carboxylic acid
  MOD_RES (4)..(4): 2-amino-2-(pent-4-en-1-yl)hept-6-enoic acid
  MOD_RES (11)..(11): (S)-3-amino-1-((pent-4-en-1-yloxy)carbonyl)pyrrolidine-3- carboxylic acid
  MOD_RES (12)..(12): (S)-2-amino-3-(2-chlorophenyl)propanoic acid
  MOD_RES (13)..(13): (S)-2-amino-3-(benzo[b]thiophen-3-yl)propanoic acid
  C-term amino
XDFXDDAAFTXFXQ

SEQ ID NO: 734 - protein, 14 aa, Artificial Sequence
  Description of Artificial Sequence: Synthetic peptide
  N-term Acetic Acid
  MOD_RES (1)..(1): (R)-2-allylpyrrolidine-2-carboxylic acid
  MOD_RES (3)..(3): (S)-2-amino-3-cyclohexylpropanoic acid
  MOD_RES (4)..(4): 2-amino-2-(pent-4-en-1-yl)hept-6-enoic acid
  MOD_RES (11)..(11): (S)-3-amino-1-((pent-4-en-1-yloxy)carbonyl)pyrrolidine-3- carboxylic acid
  MOD_RES (12)..(12): (S)-2-amino-3-(2-chlorophenyl)propanoic acid
  MOD_RES (13)..(13): (S)-2-amino-3-(benzo[b]thiophen-3-yl)propanoic acid
  C-term amino
XDXXDDAAFSXFXQ

SEQ ID NO: 735 - protein, 14 aa, Artificial Sequence
  Description of Artificial Sequence: Synthetic peptide
  N-term Acetic Acid
  MOD_RES (1)..(1): (R)-2-allylpyrrolidine-2-carboxylic acid
  MOD_RES (4)..(4): 2-amino-2-(pent-4-en-1-yl)hept-6-enoic acid
  MOD_RES (11)..(11): (S)-3-amino-1-((pent-4-en-1-yloxy)carbonyl)pyrrolidine-3- carboxylic acid
  MOD_RES (12)..(12): (S)-2-amino-3-(2-chlorophenyl)propanoic acid
  MOD_RES (13)..(13): (S)-2-amino-3-(benzo[b]thiophen-3-yl)propanoic acid
  C-term amino
XDFXDDAAFSXFXQ

SEQ ID NO: 736 - protein, 14 aa, Artificial Sequence
  Description of Artificial Sequence: Synthetic peptide
  N-term Acetic Acid
  MOD_RES (1)..(1): (R)-2-allylpyrrolidine-2-carboxylic acid
  MOD_RES (3)..(3): (S)-2-amino-3-cyclohexylpropanoic acid
  MOD_RES (4)..(4): 2-amino-2-(pent-4-en-1-yl)hept-6-enoic acid
  MOD_RES (11)..(11): (S)-3-amino-1-((pent-4-en-1-yloxy)carbonyl)pyrrolidine-3- carboxylic acid
  MOD_RES (12)..(12): (S)-2-amino-3-(2-chlorophenyl)propanoic acid
  MOD_RES (13)..(13): (S)-2-amino-3-(benzo[b]thiophen-3-yl)propanoic acid
  C-term amino
XDXXDDAAFNXFXS

SEQ ID NO: 737 - protein, 14 aa, Artificial Sequence
  Description of Artificial Sequence: Synthetic peptide
  N-term Acetic Acid
  MOD_RES (1)..(1): (R)-2-allylpyrrolidine-2-carboxylic acid
  MOD_RES (4)..(4): 2-amino-2-(pent-4-en-1-yl)hept-6-enoic acid
  MOD_RES (11)..(11): (S)-3-amino-1-((pent-4-en-1-yloxy)carbonyl)pyrrolidine-3- carboxylic acid
  MOD_RES (12)..(12): (S)-2-amino-3-(2-chlorophenyl)propanoic acid
  MOD_RES (13)..(13): (S)-2-amino-3-(benzo[b]thiophen-3-yl)propanoic acid
  C-term amino
XDFXDDAAFNXFXS

SEQ ID NO: 738 - protein, 14 aa, Artificial Sequence
  Description of Artificial Sequence: Synthetic peptide
  N-term Acetic Acid
  MOD_RES (1)..(1): (R)-2-allylpyrrolidine-2-carboxylic acid
  MOD_RES (3)..(3): (S)-2-amino-3-cyclohexylpropanoic acid
  MOD_RES (4)..(4): 2-amino-2-(pent-4-en-1-yl)hept-6-enoic acid
  MOD_RES (11)..(11): (S)-3-amino-1-((pent-4-en-1-yloxy)carbonyl)pyrrolidine-3- carboxylic acid
  MOD_RES (12)..(12): (S)-2-amino-3-(2-chlorophenyl)propanoic acid
  MOD_RES (13)..(13): (S)-2-amino-3-(benzo[b]thiophen-3-yl)propanoic acid
  C-term amino
XDXXDDAAFTXFXS

SEQ ID NO: 739 - protein, 14 aa, Artificial Sequence
  Description of Artificial Sequence: Synthetic peptide
  N-term Acetic Acid
  MOD_RES (1)..(1): (R)-2-allylpyrrolidine-2-carboxylic acid
  MOD_RES (4)..(4): 2-amino-2-(pent-4-en-1-yl)hept-6-enoic acid
  MOD_RES (11)..(11): (S)-3-amino-1-((pent-4-en-1-yloxy)carbonyl)pyrrolidine-3- carboxylic acid
  MOD_RES (12)..(12): (S)-2-amino-3-(2-chlorophenyl)propanoic acid
  MOD_RES (13)..(13): (S)-2-amino-3-(benzo[b]thiophen-3-yl)propanoic acid
  C-term amino
XDFXDDAAFTXFXS

SEQ ID NO: 740 - protein, 14 aa, Artificial Sequence
  Description of Artificial Sequence: Synthetic peptide
  N-term Acetic Acid
  MOD_RES (1)..(1): (R)-2-allylpyrrolidine-2-carboxylic acid
  MOD_RES (3)..(3): (S)-2-amino-3-cyclohexylpropanoic acid
  MOD_RES (4)..(4): 2-amino-2-(pent-4-en-1-yl)hept-6-enoic acid
  MOD_RES (11)..(11): (S)-3-amino-1-((pent-4-en-1-yloxy)carbonyl)pyrrolidine-3- carboxylic acid
  MOD_RES (12)..(12): (S)-2-amino-3-(2-chlorophenyl)propanoic acid
  MOD_RES (13)..(13): (S)-2-amino-3-(benzo[b]thiophen-3-yl)propanoic acid
  C-term amino
XDXXDDAAFSXFXS

SEQ ID NO: 741 - protein, 14 aa, Artificial Sequence
  Description of Artificial Sequence: Synthetic peptide
  N-term Acetic Acid
  MOD_RES (1)..(1): (R)-2-allylpyrrolidine-2-carboxylic acid
  MOD_RES (4)..(4): 2-amino-2-(pent-4-en-1-yl)hept-6-enoic acid
  MOD_RES (11)..(11): (S)-3-amino-1-((pent-4-en-1-yloxy)carbonyl)pyrrolidine-3- carboxylic acid
  MOD_RES (12)..(12): (S)-2-amino-3-(2-chlorophenyl)propanoic acid
  MOD_RES (13)..(13): (S)-2-amino-3-(benzo[b]thiophen-3-yl)propanoic acid
  C-term amino
XDFXDDAAFSXFXS

SEQ ID NO: 742 - protein, 14 aa, Artificial Sequence
  Description of Artificial Sequence: Synthetic peptide
  N-term 2-azidoacetic acid
  MOD_RES (1)..(1): (R)-2-allylpyrrolidine-2-carboxylic acid
  MOD_RES (3)..(3): (S)-2-amino-4,4-dimethylpentanoic acid
  MOD_RES (4)..(4): 2-amino-2-(pent-4-en-1-yl)hept-6-enoic acid
  MOD_RES (11)..(11): (S)-2-amino-2-methyldec-9-enoic acid
  MOD_RES (12)..(12): (S)-2-amino-3-(thiophen-3-yl)propanoic acid
  MOD_RES (13)..(13): (S)-2-amino-3-(benzo[b]thiophen-3-yl)propanoic acid
  C-term amino
XDXXDDAAFNXXXQ

SEQ ID NO: 743 - protein, 14 aa, Artificial Sequence
  Description of Artificial Sequence: Synthetic peptide
  N-term 2-azidoacetic acid
  MOD_RES (1)..(1): (R)-2-allylpyrrolidine-2-carboxylic acid
  MOD_RES (3)..(3): (S)-2-amino-4,4-dimethylpentanoic acid
  MOD_RES (4)..(4): 2-amino-2-(pent-4-en-1-yl)hept-6-enoic acid
  MOD_RES (6)..(6): (S)-2-amino-3-((carboxymethyl)(2,2,2-trifluoroethyl)amino) propanoic acid
  MOD_RES (11)..(11): (S)-3-amino-1-((pent-4-en-1-yloxy)carbonyl)pyrrolidine-3- carboxylic acid
  MOD_RES (12)..(12): (S)-2-amino-3-(thiophen-3-yl)propanoic acid
  MOD_RES (13)..(13): (S)-2-amino-3-(benzo[b]thiophen-3-yl)propanoic acid
  C-term amino
XDXXDXAAFNXXXQ

SEQ ID NO: 744 - protein, 14 aa, Artificial Sequence
  Description of Artificial Sequence: Synthetic peptide
  N-term 2-azidoacetic acid
  MOD_RES (1)..(1): (R)-2-allylpyrrolidine-2-carboxylic acid
  MOD_RES (3)..(3): (S)-2-amino-4,4-dimethylpentanoic acid
  MOD_RES (4)..(4): 2-amino-2-(pent-4-en-1-yl)hept-6-enoic acid
  MOD_RES (11)..(11): (S)-3-amino-1-((pent-4-en-1-yloxy)carbonyl)pyrrolidine-3- carboxylic acid
  MOD_RES (13)..(13): (S)-2-amino-3-(benzo[b]thiophen-3-yl)propanoic acid
  C-term amino
XDXXDDAAFNXFXH

SEQ ID NO: 745 - protein, 14 aa, Artificial Sequence
  Description of Artificial Sequence: Synthetic peptide
  N-term 2-azidoacetic acid
  MOD_RES (1)..(1): (R)-2-allylpyrrolidine-2-carboxylic acid
  MOD_RES (3)..(3): (S)-2-amino-4,4-dimethylpentanoic acid
  MOD_RES (4)..(4): 2-amino-2-(pent-4-en-1-yl)hept-6-enoic acid
  MOD_RES (5)..(5): (S)-2-amino-3-(thiophen-3-yl)propanoic acid
  MOD_RES (6)..(6): (S)-2-amino-3-((carboxymethyl)(2,2,2-trifluoroethyl)amino) propanoic acid
  MOD_RES (11)..(11): (S)-3-amino-1-((pent-4-en-1-yloxy)carbonyl)pyrrolidine-3- carboxylic acid
  MOD_RES (13)..(13): (S)-2-amino-3-(benzo[b]thiophen-3-yl)propanoic acid
  C-term amino
XDXXXXAAFNXDXQ

SEQ ID NO: 746 - protein, 14 aa, Artificial Sequence
  Description of Artificial Sequence: Synthetic peptide
  N-term 2-azidoacetic acid
  MOD_RES (1)..(1): (R)-2-allylpyrrolidine-2-carboxylic acid
  MOD_RES (3)..(3): (S)-2-amino-4,4-dimethylpentanoic acid
  MOD_RES (4)..(4): 2-amino-2-(pent-4-en-1-yl)hept-6-enoic acid
  MOD_RES (11)..(11): (S)-3-amino-1-((pent-4-en-1-yloxy)carbonyl)pyrrolidine-3- carboxylic acid
  MOD_RES (12)..(12): (S)-2-amino-3-(thiophen-3-yl)propanoic acid
  MOD_RES (13)..(13): (S)-2-amino-3-(benzo[b]thiophen-3-yl)propanoic acid
  MOD_RES (14)..(14): D-threonine
  C-term amino
XDXXDDAAFNXXXT

SEQ ID NO: 747 - protein, 14 aa, Artificial Sequence
  Description of Artificial Sequence: Synthetic peptide
  N-term 2-azidoacetic acid
  MOD_RES (1)..(1): (R)-2-allylpyrrolidine-2-carboxylic acid
  MOD_RES (3)..(3): (S)-2-amino-4,4-dimethylpentanoic acid
  MOD_RES (4)..(4): 2-amino-2-(pent-4-en-1-yl)hept-6-enoic acid
  MOD_RES (6)..(6): (S)-2-amino-3-((carboxymethyl)(2,2,2-trifluoroethyl)amino) propanoic acid
  MOD_RES (11)..(11): (S)-3-amino-1-((pent-4-en-1-yloxy)carbonyl)pyrrolidine-3- carboxylic acid
  MOD_RES (12)..(12): (S)-2-amino-3-(2-chlorophenyl)propanoic acid
  MOD_RES (13)..(13): (S)-2-amino-3-(benzo[b]thiophen-3-yl)propanoic acid
  C-term amino
XDXXDXAAFTXFXQ

SEQ ID NO: 748 - protein, 14 aa, Artificial Sequence
  Description of Artificial Sequence: Synthetic peptide
  N-term 2-azidoacetic acid
  MOD_RES (1)..(1): (R)-2-allylpyrrolidine-2-carboxylic acid
  MOD_RES (3)..(3): (S)-2-amino-4,4-dimethylpentanoic acid
  MOD_RES (4)..(4): 2-amino-2-(pent-4-en-1-yl)hept-6-enoic acid
  MOD_RES (11)..(11): (S)-3-amino-1-((pent-4-en-1-yloxy)carbonyl)pyrrolidine-3- carboxylic acid
  MOD_RES (12)..(12): (S)-2-amino-3-(2-chlorophenyl)propanoic acid
  MOD_RES (13)..(13): (S)-2-amino-3-(benzo[b]thiophen-3-yl)propanoic acid
  MOD_RES (14)..(14): D-threonine
  C-term amino
XDXXDDAAFTXFXT

SEQ ID NO: 749 - protein, 14 aa, Artificial Sequence
  Description of Artificial Sequence: Synthetic peptide
  N-term Acetic Acid
  MOD_RES (1)..(1): (R)-2-allylpyrrolidine-2-carboxylic acid
  MOD_RES (3)..(3): (S)-2-amino-4,4-dimethylpentanoic acid
  MOD_RES (4)..(4): 2-amino-2-(pent-4-en-1-yl)hept-6-enoic acid
  MOD_RES (6)..(6): (S)-2-amino-3-((carboxymethyl)(2,2,2-trifluoroethyl)amino) propanoic acid
  MOD_RES (11)..(11): (S)-3-amino-1-((pent-4-en-1-yloxy)carbonyl)pyrrolidine-3- carboxylic acid
  MOD_RES (12)..(12): (S)-2-amino-3-(2-chlorophenyl)propanoic acid
  MOD_RES (13)..(13): (S)-2-amino-3-(benzo[b]thiophen-3-yl)propanoic acid
  C-term hexane-1,6-diamine
XDXXDXAAFTXFXQ

SEQ ID NO: 750 - protein, 14 aa, Artificial Sequence
  Description of Artificial Sequence: Synthetic peptide
  N-term Acetic Acid
  MOD_RES (1)..(1): (R)-2-allylpyrrolidine-2-carboxylic acid
  MOD_RES (3)..(3): (S)-2-amino-4,4-dimethylpentanoic acid
  MOD_RES (4)..(4): 2-amino-2-(pent-4-en-1-yl)hept-6-enoic acid
  MOD_RES (11)..(11): (S)-3-amino-1-((pent-4-en-1-yloxy)carbonyl)pyrrolidine-3- carboxylic acid
  MOD_RES (12)..(12): (S)-2-amino-3-(2-chlorophenyl)propanoic acid
  MOD_RES (13)..(13): (S)-2-amino-3-(benzo[b]thiophen-3-yl)propanoic acid
  C-term amino
XDXXDDAAFLXFXQ

SEQ ID NO: 751 - protein, 14 aa, Artificial Sequence
  Description of Artificial Sequence: Synthetic peptide
  N-term Acetic Acid
  MOD_RES (1)..(1): (R)-2-allylpyrrolidine-2-carboxylic acid
  MOD_RES (3)..(3): (S)-2-amino-4,4-dimethylpentanoic acid
  MOD_RES (4)..(4): 2-amino-2-(pent-4-en-1-yl)hept-6-enoic acid
  MOD_RES (11)..(11): (S)-3-amino-1-((pent-4-en-1-yloxy)carbonyl)pyrrolidine-3- carboxylic acid
  MOD_RES (12)..(12): (S)-2-amino-3-(2-chlorophenyl)propanoic acid
  MOD_RES (13)..(13): (S)-2-amino-3-(benzo[b]thiophen-3-yl)propanoic acid
  C-term amino
XDXXDEAAFLXFXQ

SEQ ID NO: 752 - protein, 14 aa, Artificial Sequence
  Description of Artificial Sequence: Synthetic peptide
  N-term Acetic Acid
  MOD_RES (1)..(1): (R)-2-allylpyrrolidine-2-carboxylic acid
  MOD_RES (3)..(3): (S)-2-amino-4,4-dimethylpentanoic acid
  MOD_RES (4)..(4): 2-amino-2-(pent-4-en-1-yl)hept-6-enoic acid
  MOD_RES (11)..(11): (S)-3-amino-1-((pent-4-en-1-yloxy)carbonyl)pyrrolidine-3- carboxylic acid
  MOD_RES (12)..(12): (S)-2-amino-3-(2-chlorophenyl)propanoic acid
  MOD_RES (13)..(13): (S)-2-amino-3-(benzo[b]thiophen-3-yl)propanoic acid
  C-term amino
XDXXDDAAFLXFXS

SEQ ID NO: 753 - protein, 14 aa, Artificial Sequence
  Description of Artificial Sequence: Synthetic peptide
  N-term Acetic Acid
  MOD_RES (1)..(1): (R)-2-allylpyrrolidine-2-carboxylic acid
  MOD_RES (3)..(3): (S)-2-amino-4,4-dimethylpentanoic acid
  MOD_RES (4)..(4): 2-amino-2-(pent-4-en-1-yl)hept-6-enoic acid
  MOD_RES (11)..(11): (S)-3-amino-1-((pent-4-en-1-yloxy)carbonyl)pyrrolidine-3- carboxylic acid
  MOD_RES (12)..(12): (S)-2-amino-3-(2-chlorophenyl)propanoic acid
  MOD_RES (13)..(13): (S)-2-amino-3-(benzo[b]thiophen-3-yl)propanoic acid
  C-term amino
XDXXDEAAFLXFXS

SEQ ID NO: 754 - protein, 14 aa, Artificial Sequence
  Description of Artificial Sequence: Synthetic peptide
  N-term Acetic Acid
  MOD_RES (1)..(1): (R)-2-allylpyrrolidine-2-carboxylic acid
  MOD_RES (3)..(3): (S)-2-amino-4,4-dimethylpentanoic acid
  MOD_RES (4)..(4): 2-amino-2-(pent-4-en-1-yl)hept-6-enoic acid
  MOD_RES (11)..(11): (S)-3-amino-1-((pent-4-en-1-yloxy)carbonyl)pyrrolidine-3- carboxylic acid
  MOD_RES (12)..(12): (S)-2-amino-3-(2-chlorophenyl)propanoic acid
  MOD_RES (13)..(13): (S)-2-amino-3-(benzo[b]thiophen-3-yl)propanoic acid
  C-term amino
XDXXDDAAFLXFXT

SEQ ID NO: 755 - protein, 14 aa, Artificial Sequence
  Description of Artificial Sequence: Synthetic peptide
  N-term Acetic Acid
  MOD_RES (1)..(1): (R)-2-allylpyrrolidine-2-carboxylic acid
  MOD_RES (3)..(3): (S)-2-amino-4,4-dimethylpentanoic acid
  MOD_RES (4)..(4): 2-amino-2-(pent-4-en-1-yl)hept-6-enoic acid
  MOD_RES (11)..(11): (S)-3-amino-1-((pent-4-en-1-yloxy)carbonyl)pyrrolidine-3- carboxylic acid
  MOD_RES (12)..(12): (S)-2-amino-3-(2-chlorophenyl)propanoic acid
  MOD_RES (13)..(13): (S)-2-amino-3-(benzo[b]thiophen-3-yl)propanoic acid
  C-term amino
XDXXDEAAFLXFXT

SEQ ID NO: 756 - protein, 14 aa, Artificial Sequence
  Description of Artificial Sequence: Synthetic peptide
  N-term Acetic Acid
  MOD_RES (1)..(1): (R)-2-allylpyrrolidine-2-carboxylic acid
  MOD_RES (3)..(3): (S)-2-amino-4,4-dimethylpentanoic acid
  MOD_RES (4)..(4): 2-amino-2-(pent-4-en-1-yl)hept-6-enoic acid
  MOD_RES (11)..(11): (S)-3-amino-1-((pent-4-en-1-yloxy)carbonyl)pyrrolidine-3- carboxylic acid
  MOD_RES (13)..(13): (S)-2-amino-3-(benzo[b]thiophen-3-yl)propanoic acid
  C-term amino
XDXXDDAAFLXFXQ

SEQ ID NO: 757 - protein, 14 aa, Artificial Sequence
  Description of Artificial Sequence: Synthetic peptide
  N-term Acetic Acid
  MOD_RES (1)..(1): (R)-2-allylpyrrolidine-2-carboxylic acid
  MOD_RES (3)..(3): (S)-2-amino-4,4-dimethylpentanoic acid
  MOD_RES (4)..(4): 2-amino-2-(pent-4-en-1-yl)hept-6-enoic acid
  MOD_RES (11)..(11): (S)-3-amino-1-((pent-4-en-1-yloxy)carbonyl)pyrrolidine-3- carboxylic acid
  MOD_RES (13)..(13): (S)-2-amino-3-(benzo[b]thiophen-3-yl)propanoic acid
  C-term amino
XDXXDEAAFLXFXQ

SEQ ID NO: 758 - protein, 14 aa, Artificial Sequence
  Description of Artificial Sequence: Synthetic peptide
  N-term Acetic Acid
  MOD_RES (1)..(1): (R)-2-allylpyrrolidine-2-carboxylic acid
  MOD_RES (3)..(3): (S)-2-amino-3-cyclohexylpropanoic acid
  MOD_RES (4)..(4): 2-amino-2-(pent-4-en-1-yl)hept-6-enoic acid
  MOD_RES (11)..(11): (S)-3-amino-1-((pent-4-en-1-yloxy)carbonyl)pyrrolidine-3- carboxylic acid
  MOD_RES (12)..(12): (S)-2-amino-3-(2-chlorophenyl)propanoic acid
  MOD_RES (13)..(13): (S)-2-amino-3-(benzo[b]thiophen-3-yl)propanoic acid
  C-term amino
XDXXDDAAFLXFXQ

SEQ ID NO: 759 - protein, 14 aa, Artificial Sequence
  Description of Artificial Sequence: Synthetic peptide
  N-term Acetic Acid
  MOD_RES (1)..(1): (R)-2-allylpyrrolidine-2-carboxylic acid
  MOD_RES (3)..(3): (S)-2-amino-3-cyclohexylpropanoic acid
  MOD_RES (4)..(4): 2-amino-2-(pent-4-en-1-yl)hept-6-enoic acid
  MOD_RES (11)..(11): (S)-3-amino-1-((pent-4-en-1-yloxy)carbonyl)pyrrolidine-3- carboxylic acid
  MOD_RES (12)..(12): (S)-2-amino-3-(2-chlorophenyl)propanoic acid
  MOD_RES (13)..(13): (S)-2-amino-3-(benzo[b]thiophen-3-yl)propanoic acid
  C-term amino
XDXXDEAAFLXFXQ

SEQ ID NO: 760 - protein, 14 aa, Artificial Sequence
  Description of Artificial Sequence: Synthetic peptide
  N-term Acetic Acid
  MOD_RES (1)..(1): (R)-2-allylpyrrolidine-2-carboxylic acid
  MOD_RES (3)..(3): (S)-2-amino-4,4-dimethylpentanoic acid
  MOD_RES (4)..(4): 2-amino-2-(pent-4-en-1-yl)hept-6-enoic acid
  MOD_RES (11)..(11): (S)-3-amino-1-((pent-4-en-1-yloxy)carbonyl)pyrrolidine-3- carboxylic acid
  MOD_RES (12)..(12): (S)-2-amino-3-(2-chlorophenyl)propanoic acid
  MOD_RES (13)..(13): (S)-2-amino-3-(benzo[b]thiophen-3-yl)propanoic acid
  C-term ethanamine
XDXXDDAAFNXFXQ

SEQ ID NO: 761 - protein, 13 aa, Artificial Sequence
  Description of Artificial Sequence: Synthetic peptide
  N-term Acetic Acid
  MOD_RES (1)..(1): (R)-2-allylpyrrolidine-2-carboxylic acid
  MOD_RES (3)..(3): (S)-2-amino-4,4-dimethylpentanoic acid
  MOD_RES (4)..(4): 2-amino-2-(pent-4-en-1-yl)hept-6-enoic acid
  MOD_RES (11)..(11): (S)-3-amino-1-((pent-4-en-1-yloxy)carbonyl)pyrrolidine-3- carboxylic acid
  MOD_RES (12)..(12): (S)-2-amino-3-(2-chlorophenyl)propanoic acid
  MOD_RES (13)..(13): (S)-2-amino-3-(benzo[b]thiophen-3-yl)propanoic acid
  C-term (S)-2-amino-4-methylpentan-1-ol
XDXXDDAAFNXFX

SEQ ID NO: 762 - protein, 13 aa, Artificial Sequence
  Description of Artificial Sequence: Synthetic peptide
  N-term Acetic Acid
  MOD_RES (1)..(1): (R)-2-allylpyrrolidine-2-carboxylic acid
  MOD_RES (3)..(3): (S)-2-amino-4,4-dimethylpentanoic acid
  MOD_RES (4)..(4): 2-amino-2-(pent-4-en-1-yl)hept-6-enoic acid
  MOD_RES (11)..(11): (S)-3-amino-1-((pent-4-en-1-yloxy)carbonyl)pyrrolidine-3- carboxylic acid
  MOD_RES (12)..(12): (S)-2-amino-3-(2-chlorophenyl)propanoic acid
  MOD_RES (13)..(13): (S)-2-amino-3-(benzo[b]thiophen-3-yl)propanoic acid
  C-term (S)-2-aminopropan-1-ol
XDXXDDAAFNXFX

SEQ ID NO: 763 - protein, 13 aa, Artificial Sequence
  Description of Artificial Sequence: Synthetic peptide
  N-term Acetic Acid
  MOD_RES (1)..(1): (R)-2-allylpyrrolidine-2-carboxylic acid
  MOD_RES (3)..(3): (S)-2-amino-4,4-dimethylpentanoic acid
  MOD_RES (4)..(4): 2-amino-2-(pent-4-en-1-yl)hept-6-enoic acid
  MOD_RES (11)..(11): (S)-3-amino-1-((pent-4-en-1-yloxy)carbonyl)pyrrolidine-3- carboxylic acid
  MOD_RES (12)..(12): (S)-2-amino-3-(2-chlorophenyl)propanoic acid
  MOD_RES (13)..(13): (S)-2-amino-3-(benzo[b]thiophen-3-yl)propanoic acid
  C-term (2R,3R)-2-aminobutane-1,3-diol
XDXXDDAAFNXFX

SEQ ID NO: 764 - protein, 13 aa, Artificial Sequence
  Description of Artificial Sequence: Synthetic peptide
  N-term Acetic Acid
  MOD_RES (1)..(1): (R)-2-allylpyrrolidine-2-carboxylic acid
  MOD_RES (3)..(3): (S)-2-amino-4,4-dimethylpentanoic acid
  MOD_RES (4)..(4): 2-amino-2-(pent-4-en-1-yl)hept-6-enoic acid
  MOD_RES (11)..(11): (S)-3-amino-1-((pent-4-en-1-yloxy)carbonyl)pyrrolidine-3- carboxylic acid
  MOD_RES (12)..(12): (S)-2-amino-3-(2-chlorophenyl)propanoic acid
  MOD_RES (13)..(13): (S)-2-amino-3-(benzo[b]thiophen-3-yl)propanoic acid
  C-term (S)-2-amino-3-phenylpropan-1-ol
XDXXDDAAFNXFX

SEQ ID NO: 765 - protein, 13 aa, Artificial Sequence
  Description of Artificial Sequence: Synthetic peptide
  N-term Acetic Acid
  MOD_RES (1)..(1): (R)-2-allylpyrrolidine-2-carboxylic acid
  MOD_RES (3)..(3): (S)-2-amino-4,4-dimethylpentanoic acid
  MOD_RES (4)..(4): 2-amino-2-(pent-4-en-1-yl)hept-6-enoic acid
  MOD_RES (11)..(11): (S)-3-amino-1-((pent-4-en-1-yloxy)carbonyl)pyrrolidine-3- carboxylic acid
  MOD_RES (12)..(12): (S)-2-amino-3-(2-chlorophenyl)propanoic acid
  MOD_RES (13)..(13): (S)-2-amino-3-(benzo[b]thiophen-3-yl)propanoic acid
  C-term (S)-pyrrolidin-2-ylmethanol
XDXXDDAAFNXFX

SEQ ID NO: 766 - protein, 14 aa, Artificial Sequence
  Description of Artificial Sequence: Synthetic peptide
  N-term Acetic Acid
  MOD_RES (1)..(1): (R)-2-allylpyrrolidine-2-carboxylic acid
  MOD_RES (3)..(3): (S)-2-amino-4,4-dimethylpentanoic acid
  MOD_RES (4)..(4): 2-amino-2-(pent-4-en-1-yl)hept-6-enoic acid
  MOD_RES (6)..(6): (S)-2-amino-3-((carboxymethyl)(2,2,2-trifluoroethyl)amino) propanoic acid
  MOD_RES (11)..(11): (S)-3-amino-1-((pent-4-en-1-yloxy)carbonyl)pyrrolidine-3- carboxylic acid
  MOD_RES (12)..(12): (S)-2-amino-3-(2-chlorophenyl)propanoic acid
  MOD_RES (13)..(13): (S)-2-amino-3-(benzo[b]thiophen-3-yl)propanoic acid
  C-term 6-azidohexan-1-amine
XDXXDXAAFFXFXQ

SEQ ID NO: 767 - protein, 14 aa, Artificial Sequence
  Description of Artificial Sequence: Synthetic peptide
  N-term Acetic Acid
  MOD_RES (1)..(1): (R)-2-allylpyrrolidine-2-carboxylic acid
  MOD_RES (3)..(3): (S)-2-amino-4,4-dimethylpentanoic acid
  MOD_RES (4)..(4): 2-amino-2-(pent-4-en-1-yl)hept-6-enoic acid
  MOD_RES (11)..(11): (S)-2-amino-2-methyldec-9-enoic acid
  MOD_RES (12)..(12): (S)-2-amino-3-(2-chlorophenyl)propanoic acid
  MOD_RES (13)..(13): (S)-2-amino-3-(benzo[b]thiophen-3-yl)propanoic acid
  C-term amino
XDXXDDAAFTXFXQ

SEQ ID NO: 768 - protein, 14 aa, Artificial Sequence
  Description of Artificial Sequence: Synthetic peptide
  N-term Acetic Acid
  MOD_RES (1)..(1): (R)-2-allylpyrrolidine-2-carboxylic acid
  MOD_RES (3)..(3): (S)-2-amino-4,4-dimethylpentanoic acid
  MOD_RES (4)..(4): 2-amino-2-(pent-4-en-1-yl)hept-6-enoic acid
  MOD_RES (11)..(11): (S)-2-amino-2-methyldec-9-enoic acid
  MOD_RES (12)..(12): (S)-2-amino-3-(2-chlorophenyl)propanoic acid
  MOD_RES (13)..(13): (S)-2-amino-3-(benzo[b]thiophen-3-yl)propanoic acid
  C-term amino
XDXXDEAAFTXFXQ

SEQ ID NO: 769 - protein, 14 aa, Artificial Sequence
  Description of Artificial Sequence: Synthetic peptide
  N-term Acetic Acid
  MOD_RES (1)..(1): (R)-2-allylpyrrolidine-2-carboxylic acid
  MOD_RES (3)..(3): (S)-2-amino-4,4-dimethylpentanoic acid
  MOD_RES (4)..(4): 2-amino-2-(pent-4-en-1-yl)hept-6-enoic acid
  MOD_RES (11)..(11): (S)-2-amino-2-methyldec-9-enoic acid
  MOD_RES (12)..(12): (S)-2-amino-3-(2-chlorophenyl)propanoic acid
  MOD_RES (13)..(13): (S)-2-amino-3-(benzo[b]thiophen-3-yl)propanoic acid
  C-term amino
XDXXDDAAFTXFXT

SEQ ID NO: 770 - protein, 14 aa, Artificial Sequence
  Description of Artificial Sequence: Synthetic peptide
  N-term Acetic Acid
  MOD_RES (1)..(1): (R)-2-allylpyrrolidine-2-carboxylic acid
  MOD_RES (3)..(3): (S)-2-amino-4,4-dimethylpentanoic acid
  MOD_RES (4)..(4): 2-amino-2-(pent-4-en-1-yl)hept-6-enoic acid
  MOD_RES (11)..(11): (S)-2-amino-2-methyldec-9-enoic acid
  MOD_RES (12)..(12): (S)-2-amino-3-(2-chlorophenyl)propanoic acid
  MOD_RES (13)..(13): (S)-2-amino-3-(benzo[b]thiophen-3-yl)propanoic acid
  C-term amino
XDXXDEAAFTXFXT

SEQ ID NO: 771 - protein, 14 aa, Artificial Sequence
  Description of Artificial Sequence: Synthetic peptide
  N-term Acetic Acid
  MOD_RES (1)..(1): (R)-2-allylpyrrolidine-2-carboxylic acid
  MOD_RES (3)..(3): (S)-2-amino-4,4-dimethylpentanoic acid
  MOD_RES (4)..(4): 2-amino-2-(pent-4-en-1-yl)hept-6-enoic acid
  MOD_RES (11)..(11): (S)-2-amino-2-methyldec-9-enoic acid
  MOD_RES (12)..(12): (S)-2-amino-3-(2-chlorophenyl)propanoic acid
  MOD_RES (13)..(13): (S)-2-amino-3-(benzo[b]thiophen-3-yl)propanoic acid
  MOD_RES (14)..(14): D-threonine
  C-term amino
XDXXDDAAFTXFXT

SEQ ID NO: 772 - protein, 14 aa, Artificial Sequence
  Description of Artificial Sequence: Synthetic peptide
  N-term Acetic Acid
  MOD_RES (1)..(1): (R)-2-allylpyrrolidine-2-carboxylic acid
  MOD_RES (3)..(3): (S)-2-amino-4,4-dimethylpentanoic acid
  MOD_RES (4)..(4): 2-amino-2-(pent-4-en-1-yl)hept-6-enoic acid
  MOD_RES (11)..(11): (S)-2-amino-2-methyldec-9-enoic acid
  MOD_RES (12)..(12): (S)-2-amino-3-(2-chlorophenyl)propanoic acid
  MOD_RES (13)..(13): (S)-2-amino-3-(benzo[b]thiophen-3-yl)propanoic acid
  MOD_RES (14)..(14): D-threonine
  C-term amino
XDXXDEAAFTXFXT

SEQ ID NO: 773 - protein, 14 aa, Artificial Sequence
  Description of Artificial Sequence: Synthetic peptide
  N-term Acetic Acid
  MOD_RES (1)..(1): (R)-2-allylpyrrolidine-2-carboxylic acid
  MOD_RES (3)..(3): (S)-2-amino-4,4-dimethylpentanoic acid
  MOD_RES (4)..(4): 2-amino-2-(pent-4-en-1-yl)hept-6-enoic acid
  MOD_RES (11)..(11): (S)-2-amino-2-methyldec-9-enoic acid
  MOD_RES (12)..(12): (S)-2-amino-3-(2-chlorophenyl)propanoic acid
  MOD_RES (13)..(13): (S)-2-amino-3-(benzo[b]thiophen-3-yl)propanoic acid
  C-term amino
XDXXDDAAFLXFXQ

SEQ ID NO: 774 - protein, 14 aa, Artificial Sequence
  Description of Artificial Sequence: Synthetic peptide
  N-term Acetic Acid
  MOD_RES (1)..(1): (R)-2-allylpyrrolidine-2-carboxylic acid
  MOD_RES (3)..(3): (S)-2-amino-4,4-dimethylpentanoic acid
  MOD_RES (4)..(4): 2-amino-2-(pent-4-en-1-yl)hept-6-enoic acid
  MOD_RES (11)..(11): (S)-2-amino-2-methyldec-9-enoic acid
  MOD_RES (12)..(12): (S)-2-amino-3-(2-chlorophenyl)propanoic acid
  MOD_RES (13)..(13): (S)-2-amino-3-(benzo[b]thiophen-3-yl)propanoic acid
  C-term amino
XDXXDEAAFLXFXQ

SEQ ID NO: 775 - protein, 14 aa, Artificial Sequence
  Description of Artificial Sequence: Synthetic peptide
  N-term Acetic Acid
  MOD_RES (1)..(1): (R)-2-allylpyrrolidine-2-carboxylic acid
  MOD_RES (3)..(3): (S)-2-amino-4,4-dimethylpentanoic acid
  MOD_RES (4)..(4): 2-amino-2-(pent-4-en-1-yl)hept-6-enoic acid
  MOD_RES (11)..(11): (S)-2-amino-2-methyldec-9-enoic acid
  MOD_RES (12)..(12): (S)-2-amino-3-(2-chlorophenyl)propanoic acid
  MOD_RES (13)..(13): (S)-2-amino-3-(benzo[b]thiophen-3-yl)propanoic acid
  MOD_RES (14)..(14): D-threonine
  C-term amino
XDXXDDAAFLXFXT

SEQ ID NO: 776 - protein, 14 aa, Artificial Sequence
  Description of Artificial Sequence: Synthetic peptide
  N-term Acetic Acid
  MOD_RES (1)..(1): (R)-2-allylpyrrolidine-2-carboxylic acid
  MOD_RES (3)..(3): (S)-2-amino-4,4-dimethylpentanoic acid
  MOD_RES (4)..(4): 2-amino-2-(pent-4-en-1-yl)hept-6-enoic acid
  MOD_RES (11)..(11): (S)-2-amino-2-methyldec-9-enoic acid
  MOD_RES (12)..(12): (S)-2-amino-3-(2-chlorophenyl)propanoic acid
  MOD_RES (13)..(13): (S)-2-amino-3-(benzo[b]thiophen-3-yl)propanoic acid
  MOD_RES (14)..(14): D-threonine
  C-term amino
XDXXDEAAFLXFXT

SEQ ID NO: 777 - protein, 14 aa, Artificial Sequence
  Description of Artificial Sequence: Synthetic peptide
  N-term Acetic Acid
  MOD_RES (1)..(1): (R)-2-allylpyrrolidine-2-carboxylic acid
  MOD_RES (3)..(3): (S)-2-amino-4,4-dimethylpentanoic acid
  MOD_RES (4)..(4): 2-amino-2-(pent-4-en-1-yl)hept-6-enoic acid
  MOD_RES (11)..(11): (S)-3-amino-1-((pent-4-en-1-yloxy)carbonyl)pyrrolidine-3- carboxylic acid
  MOD_RES (13)..(13): (S)-2-amino-3-(benzo[b]thiophen-3-yl)propanoic acid
  C-term amino
XDXXDDAAFSXFXS

SEQ ID NO: 778 - protein, 14 aa, Artificial Sequence
  Description of Artificial Sequence: Synthetic peptide
  N-term Acetic Acid
  MOD_RES (1)..(1): (R)-2-allylpyrrolidine-2-carboxylic acid
  MOD_RES (3)..(3): (S)-2-amino-3-cyclohexylpropanoic acid
  MOD_RES (4)..(4): 2-amino-2-(pent-4-en-1-yl)hept-6-enoic acid
  MOD_RES (11)..(11): (S)-3-amino-1-((pent-4-en-1-yloxy)carbonyl)pyrrolidine-3- carboxylic acid
  MOD_RES (13)..(13): (S)-2-amino-3-(benzo[b]thiophen-3-yl)propanoic acid
  C-term amino
XDXXDDAAFSXFXS

SEQ ID NO: 779 - protein, 14 aa, Artificial Sequence
  Description of Artificial Sequence: Synthetic peptide
  N-term Acetic Acid
  MOD_RES (1)..(1): (R)-2-allylpyrrolidine-2-carboxylic acid
  MOD_RES (3)..(3): (S)-2-amino-4,4-dimethylpentanoic acid
  MOD_RES (4)..(4): 2-amino-2-(pent-4-en-1-yl)hept-6-enoic acid
  MOD_RES (11)..(11): (S)-3-amino-1-((pent-4-en-1-yloxy)carbonyl)pyrrolidine-3- carboxylic acid
  MOD_RES (12)..(12): (S)-2-amino-3-(2-fluorophenyl)propanoic acid
  MOD_RES (13)..(13): (S)-2-amino-3-(benzo[b]thiophen-3-yl)propanoic acid
  C-term amino
XDXXDDAAFSXFXS

SEQ ID NO: 780 - protein, 14 aa, Artificial Sequence
  Description of Artificial Sequence: Synthetic peptide
  N-term Acetic Acid
  MOD_RES (1)..(1): (R)-2-allylpyrrolidine-2-carboxylic acid
  MOD_RES (3)..(3): (S)-2-amino-3-cyclohexylpropanoic acid
  MOD_RES (4)..(4): 2-amino-2-(pent-4-en-1-yl)hept-6-enoic acid
  MOD_RES (11)..(11): (S)-3-amino-1-((pent-4-en-1-yloxy)carbonyl)pyrrolidine-3- carboxylic acid
  MOD_RES (12)..(12): (S)-2-amino-3-(2-fluorophenyl)propanoic acid
  MOD_RES (13)..(13): (S)-2-amino-3-(benzo[b]thiophen-3-yl)propanoic acid
  C-term amino
XDXXDDAAFSXFXS

SEQ ID NO: 781 - protein, 14 aa, Artificial Sequence
  Description of Artificial Sequence: Synthetic peptide
  N-term Acetic Acid
  MOD_RES (1)..(1): (R)-2-allylpyrrolidine-2-carboxylic acid
  MOD_RES (3)..(3): (S)-2-amino-4,4-dimethylpentanoic acid
  MOD_RES (4)..(4): 2-amino-2-(pent-4-en-1-yl)hept-6-enoic acid
  MOD_RES (11)..(11): (S)-3-amino-1-((pent-4-en-1-yloxy)carbonyl)pyrrolidine-3- carboxylic acid
  MOD_RES (12)..(12): (S)-2-amino-3-(2-methoxyphenyl)propanoic acid
  MOD_RES (13)..(13): (S)-2-amino-3-(benzo[b]thiophen-3-yl)propanoic acid
  C-term amino
XDXXDDAAFSXFXS

SEQ ID NO: 782 - protein, 14 aa, Artificial Sequence
  Description of Artificial Sequence: Synthetic peptide
  N-term Acetic Acid
  MOD_RES (1)..(1): (R)-2-allylpyrrolidine-2-carboxylic acid
  MOD_RES (3)..(3): (S)-2-amino-3-cyclohexylpropanoic acid
  MOD_RES (4)..(4): 2-amino-2-(pent-4-en-1-yl)hept-6-enoic acid
  MOD_RES (11)..(11): (S)-3-amino-1-((pent-4-en-1-yloxy)carbonyl)pyrrolidine-3- carboxylic acid
  MOD_RES (12)..(12): (S)-2-amino-3-(2-methoxyphenyl)propanoic acid
  MOD_RES (13)..(13): (S)-2-amino-3-(benzo[b]thiophen-3-yl)propanoic acid
  C-term amino
XDXXDDAAFSXFXS

SEQ ID NO: 783 - protein, 14 aa, Artificial Sequence
  Description of Artificial Sequence: Synthetic peptide
  N-term Acetic Acid
  MOD_RES (1)..(1): (R)-2-allylpyrrolidine-2-carboxylic acid
  MOD_RES (3)..(3): (S)-2-amino-4,4-dimethylpentanoic acid
  MOD_RES (4)..(4): 2-amino-2-(pent-4-en-1-yl)hept-6-enoic acid
  MOD_RES (9)..(9): (S)-2-amino-3-cyclohexylpropanoic acid
  MOD_RES (11)..(11): (S)-3-amino-1-((pent-4-en-1-yloxy)carbonyl)pyrrolidine-3- carboxylic acid
  MOD_RES (13)..(13): (S)-2-amino-3-(benzo[b]thiophen-3-yl)propanoic acid
  C-term amino
XDXXDDAAXSXFXS

SEQ ID NO: 784 - protein, 14 aa, Artificial Sequence
  Description of Artificial Sequence: Synthetic peptide
  N-term Acetic Acid
  MOD_RES (1)..(1): (R)-2-allylpyrrolidine-2-carboxylic acid
  MOD_RES (3)..(3): (S)-2-amino-4,4-dimethylpentanoic acid
  MOD_RES (4)..(4): 2-amino-2-(pent-4-en-1-yl)hept-6-enoic acid
  MOD_RES (11)..(11): (S)-3-amino-1-((pent-4-en-1-yloxy)carbonyl)pyrrolidine-3- carboxylic acid
  MOD_RES (12)..(12): (S)-2-amino-3-cyclohexylpropanoic acid
  MOD_RES (13)..(13): (S)-2-amino-3-(benzo[b]thiophen-3-yl)propanoic acid
  C-term amino
XDXXDDAAFSXXXS

SEQ ID NO: 785 - protein, 14 aa, Artificial Sequence
  Description of Artificial Sequence: Synthetic peptide
  N-term Acetic Acid
  MOD_RES (1)..(1): (R)-2-allylpyrrolidine-2-carboxylic acid
  MOD_RES (3)..(3): (S)-2-amino-3-cyclohexylpropanoic acid
  MOD_RES (4)..(4): 2-amino-2-(pent-4-en-1-yl)hept-6-enoic acid
  MOD_RES (10)..(10): (S)-2-amino-3-cyclohexylpropanoic acid
  MOD_RES (11)..(11): (S)-3-amino-1-((pent-4-en-1-yloxy)carbonyl)pyrrolidine-3- carboxylic acid
  MOD_RES (12)..(12): (S)-2-amino-3-(2-chlorophenyl)propanoic acid
  MOD_RES (13)..(13): (S)-2-amino-3-(benzo[b]thiophen-3-yl)propanoic acid
  C-term amino
XDXXDDAAFXXFXQ

SEQ ID NO: 786 - protein, 14 aa, Artificial Sequence
  Description of Artificial Sequence: Synthetic peptide
  N-term Acetic Acid
  MOD_RES (1)..(1): (R)-2-allylpyrrolidine-2-carboxylic acid
  MOD_RES (3)..(3): (S)-2-amino-3-(naphthalen-1-yl)propanoic acid
  MOD_RES (4)..(4): 2-amino-2-(pent-4-en-1-yl)hept-6-enoic acid
  MOD_RES (11)..(11): (S)-3-amino-1-((pent-4-en-1-yloxy)carbonyl)pyrrolidine-3- carboxylic acid
  MOD_RES (12)..(12): (S)-2-amino-3-(2-chlorophenyl)propanoic acid
  MOD_RES (13)..(13): (S)-2-amino-3-(benzo[b]thiophen-3-yl)propanoic acid
  C-term amino
XDXXDDAAFSXFXQ

SEQ ID NO: 787 - protein, 14 aa, Artificial Sequence
  Description of Artificial Sequence: Synthetic peptide
  N-term Acetic Acid
  MOD_RES (1)..(1): (R)-2-allylpyrrolidine-2-carboxylic acid
  MOD_RES (3)..(3): (S)-2-amino-3-(naphthalen-2-yl)propanoic acid
  MOD_RES (4)..(4): 2-amino-2-(pent-4-en-1-yl)hept-6-enoic acid
  MOD_RES (11)..(11): (S)-3-amino-1-((pent-4-en-1-yloxy)carbonyl)pyrrolidine-3- carboxylic acid
  MOD_RES (12)..(12): (S)-2-amino-3-(2-chlorophenyl)propanoic acid
  MOD_RES (13)..(13): (S)-2-amino-3-(benzo[b]thiophen-3-yl)propanoic acid
  C-term amino
XDXXDDAAFSXFXQ

SEQ ID NO: 788 - protein, 14 aa, Artificial Sequence
  Description of Artificial Sequence: Synthetic peptide
  N-term Acetic Acid
  MOD_RES (1)..(1): (R)-2-allylpyrrolidine-2-carboxylic acid
  MOD_RES (3)..(3): (S)-2-amino-3-(naphthalen-1-yl)propanoic acid
  MOD_RES (4)..(4): 2-amino-2-(pent-4-en-1-yl)hept-6-enoic acid
  MOD_RES (11)..(11): (S)-3-amino-1-((pent-4-en-1-yloxy)carbonyl)pyrrolidine-3- carboxylic acid
  MOD_RES (12)..(12): (S)-2-amino-3-(2-chlorophenyl)propanoic acid
  MOD_RES (13)..(13): (S)-2-amino-3-(benzo[b]thiophen-3-yl)propanoic acid
  C-term amino
XDXXDDAAFLXFXQ

SEQ ID NO: 789 - protein, 14 aa, Artificial Sequence
  Description of Artificial Sequence: Synthetic peptide
  N-term Acetic Acid
  MOD_RES (1)..(1): (R)-2-allylpyrrolidine-2-carboxylic acid
  MOD_RES (3)..(3): (S)-2-amino-3-(naphthalen-2-yl)propanoic acid
  MOD_RES (4)..(4): 2-amino-2-(pent-4-en-1-yl)hept-6-enoic acid
  MOD_RES (11)..(11): (S)-3-amino-1-((pent-4-en-1-yloxy)carbonyl)pyrrolidine-3- carboxylic acid
  MOD_RES (12)..(12): (S)-2-amino-3-(2-chlorophenyl)propanoic acid
  MOD_RES (13)..(13): (S)-2-amino-3-(benzo[b]thiophen-3-yl)propanoic acid
  C-term amino
XDXXDDAAFLXFXQ

SEQ ID NO: 790 - protein, 14 aa, Artificial Sequence
  Description of Artificial Sequence: Synthetic peptide
  N-term Acetic Acid
  MOD_RES (1)..(1): (R)-2-allylpyrrolidine-2-carboxylic acid
  MOD_RES (3)..(3): (S)-2-amino-3-cyclohexylpropanoic acid
  MOD_RES (4)..(4): 2-amino-2-(pent-4-en-1-yl)hept-6-enoic acid
  MOD_RES (11)..(11): (S)-3-amino-1-((pent-4-en-1-yloxy)carbonyl)pyrrolidine-3- carboxylic acid
  MOD_RES (12)..(12): (S)-2-amino-3-(2-chlorophenyl)propanoic acid
  MOD_RES (13)..(13): (S)-2-amino-3-(benzo[b]thiophen-3-yl)propanoic acid
  C-term amino
XDXXDDAAFLXFXS

SEQ ID NO: 791 - protein, 14 aa, Artificial Sequence
  Description of Artificial Sequence: Synthetic peptide
  N-term Acetic Acid
  MOD_RES (1)..(1): (R)-2-allylpyrrolidine-2-carboxylic acid
  MOD_RES (3)..(3): (S)-2-amino-3-cyclohexylpropanoic acid
  MOD_RES (4)..(4): 2-amino-2-(pent-4-en-1-yl)hept-6-enoic acid
  MOD_RES (10)..(10): (S)-2-amino-3-cyclohexylpropanoic acid
  MOD_RES (11)..(11): (S)-3-amino-1-((pent-4-en-1-yloxy)carbonyl)pyrrolidine-3- carboxylic acid
  MOD_RES (12)..(12): (S)-2-amino-3-(2-chlorophenyl)propanoic acid
  MOD_RES (13)..(13): (S)-2-amino-3-(benzo[b]thiophen-3-yl)propanoic acid
  C-term amino
XDXXDDAAFXXFXS

SEQ ID NO: 792 - protein, 14 aa, Artificial Sequence
  Description of Artificial Sequence: Synthetic peptide
  N-term Acetic Acid
  MOD_RES (1)..(1): (R)-2-allylpyrrolidine-2-carboxylic acid
  MOD_RES (3)..(3): (S)-2-amino-3-(naphthalen-1-yl)propanoic acid
  MOD_RES (4)..(4): 2-amino-2-(pent-4-en-1-yl)hept-6-enoic acid
  MOD_RES (11)..(11): (S)-3-amino-1-((pent-4-en-1-yloxy)carbonyl)pyrrolidine-3- carboxylic acid
  MOD_RES (12)..(12): (S)-2-amino-3-(2-chlorophenyl)propanoic acid
  MOD_RES (13)..(13): (S)-2-amino-3-(benzo[b]thiophen-3-yl)propanoic acid
  C-term amino
XDXXDDAAFTXFXS

SEQ ID NO: 793 - protein, 14 aa, Artificial Sequence
  Description of Artificial Sequence: Synthetic peptide
  N-term Acetic Acid
  MOD_RES (1)..(1): (R)-2-allylpyrrolidine-2-carboxylic acid
  MOD_RES (3)..(3): (S)-2-amino-3-(naphthalen-2-yl)propanoic acid
  MOD_RES (4)..(4): 2-amino-2-(pent-4-en-1-yl)hept-6-enoic acid
  MOD_RES (11)..(11): (S)-3-amino-1-((pent-4-en-1-yloxy)carbonyl)pyrrolidine-3- carboxylic acid
  MOD_RES (12)..(12): (S)-2-amino-3-(2-chlorophenyl)propanoic acid
  MOD_RES (13)..(13): (S)-2-amino-3-(benzo[b]thiophen-3-yl)propanoic acid
  C-term amino
XDXXDDAAFTXFXS

SEQ ID NO: 794 - protein, 14 aa, Artificial Sequence
  Description of Artificial Sequence: Synthetic peptide
  N-term Acetic Acid
  MOD_RES (1)..(1): (R)-2-allylpyrrolidine-2-carboxylic acid
  MOD_RES (3)..(3): (S)-2-amino-3-(naphthalen-1-yl)propanoic acid
  MOD_RES (4)..(4): 2-amino-2-(pent-4-en-1-yl)hept-6-enoic acid
  MOD_RES (11)..(11): (S)-3-amino-1-((pent-4-en-1-yloxy)carbonyl)pyrrolidine-3- carboxylic acid
  MOD_RES (12)..(12): (S)-2-amino-3-(2-chlorophenyl)propanoic acid
  MOD_RES (13)..(13): (S)-2-amino-3-(benzo[b]thiophen-3-yl)propanoic acid
  C-term amino
XDXXDDAAFLXFXS

SEQ ID NO: 795 - protein, 14 aa, Artificial Sequence
  Description of Artificial Sequence: Synthetic peptide
  N-term Acetic Acid
  MOD_RES (1)..(1): (R)-2-allylpyrrolidine-2-carboxylic acid
  MOD_RES (3)..(3): (S)-2-amino-3-(naphthalen-2-yl)propanoic acid
  MOD_RES (4)..(4): 2-amino-2-(pent-4-en-1-yl)hept-6-enoic acid
  MOD_RES (11)..(11): (S)-3-amino-1-((pent-4-en-1-yloxy)carbonyl)pyrrolidine-3- carboxylic acid
  MOD_RES (12)..(12): (S)-2-amino-3-(2-chlorophenyl)propanoic acid
  MOD_RES (13)..(13): (S)-2-amino-3-(benzo[b]thiophen-3-yl)propanoic acid
  C-term amino
XDXXDDAAFLXFXS

SEQ ID NO: 796 - protein, 14 aa, Artificial Sequence
  Description of Artificial Sequence: Synthetic peptide
  N-term Acetic Acid
  MOD_RES (1)..(1): (R)-2-allylpyrrolidine-2-carboxylic acid
  MOD_RES (3)..(3): (S)-2-amino-3-cyclohexylpropanoic acid
  MOD_RES (4)..(4): 2-amino-2-(pent-4-en-1-yl)hept-6-enoic acid
  MOD_RES (9)..(9): (S)-2-amino-3-(3-methoxyphenyl)propanoic acid
  MOD_RES (11)..(11): (S)-3-amino-1-((pent-4-en-1-yloxy)carbonyl)pyrrolidine-3- carboxylic acid
  MOD_RES (12)..(12): (S)-2-amino-3-(2-chlorophenyl)propanoic acid
  MOD_RES (13)..(13): (S)-2-amino-3-(benzo[b]thiophen-3-yl)propanoic acid
  C-term amino
XDXXDDAAFSXFXQ

SEQ ID NO: 797 - protein, 14 aa, Artificial Sequence
  Description of Artificial Sequence: Synthetic peptide
  N-term Acetic Acid
  MOD_RES (1)..(1): (R)-2-allylpyrrolidine-2-carboxylic acid
  MOD_RES (3)..(3): (S)-2-amino-3-cyclohexylpropanoic acid
  MOD_RES (4)..(4): 2-amino-2-(pent-4-en-1-yl)hept-6-enoic acid
  MOD_RES (9)..(9): (S)-2-amino-3-(3-(trifluoromethyl)phenyl)propanoic acid
  MOD_RES (11)..(11): (S)-3-amino-1-((pent-4-en-1-yloxy)carbonyl)pyrrolidine-3- carboxylic acid
  MOD_RES (12)..(12): (S)-2-amino-3-(2-chlorophenyl)propanoic acid
  MOD_RES (13)..(13): (S)-2-amino-3-(benzo[b]thiophen-3-yl)propanoic acid
  C-term amino
XDXXDDAAFSXFXQ

SEQ ID NO: 798 - protein, 14 aa, Artificial Sequence
  Description of Artificial Sequence: Synthetic peptide
  N-term Acetic Acid
  MOD_RES (1)..(1): (R)-2-allylpyrrolidine-2-carboxylic acid
  MOD_RES (3)..(3): (S)-2-amino-3-cyclohexylpropanoic acid
  MOD_RES (4)..(4): 2-amino-2-(pent-4-en-1-yl)hept-6-enoic acid
  MOD_RES (9)..(9): (S)-2-amino-3-(4-(trifluoromethyl)phenyl)propanoic acid
  MOD_RES (11)..(11): (S)-3-amino-1-((pent-4-en-1-yloxy)carbonyl)pyrrolidine-3- carboxylic acid
  MOD_RES (12)..(12): (S)-2-amino-3-(2-chlorophenyl)propanoic acid
  MOD_RES (13)..(13): (S)-2-amino-3-(benzo[b]thiophen-3-yl)propanoic acid
  C-term amino
XDXXDDAAFSXFXQ

SEQ ID NO: 799 - protein, 14 aa, Artificial Sequence
  Description of Artificial Sequence: Synthetic peptide
  N-term Acetic Acid
  MOD_RES (1)..(1): (R)-2-allylpyrrolidine-2-carboxylic acid
  MOD_RES (3)..(3): (S)-2-amino-4,4-dimethylpentanoic acid
  MOD_RES (4)..(4): 2-amino-2-(pent-4-en-1-yl)hept-6-enoic acid
  MOD_RES (9)..(9): (S)-2-amino-3-(3-methoxyphenyl)propanoic acid
  MOD_RES (11)..(11): (S)-3-amino-1-((pent-4-en-1-yloxy)carbonyl)pyrrolidine-3- carboxylic acid
  MOD_RES (12)..(12): (S)-2-amino-3-(2-chlorophenyl)propanoic acid
  MOD_RES (13)..(13): (S)-2-amino-3-(benzo[b]thiophen-3-yl)propanoic acid
  C-term amino
XDXXDDAAFLXFXQ

SEQ ID NO: 800 - protein, 14 aa, Artificial Sequence
  Description of Artificial Sequence: Synthetic peptide
  N-term Acetic Acid
  MOD_RES (1)..(1): (R)-2-allylpyrrolidine-2-carboxylic acid
  MOD_RES (3)..(3): (S)-2-amino-4,4-dimethylpentanoic acid
  MOD_RES (4)..(4): 2-amino-2-(pent-4-en-1-yl)hept-6-enoic acid
  MOD_RES (9)..(9): (S)-2-amino-3-(3-(trifluoromethyl)phenyl)propanoic acid
  MOD_RES (11)..(11): (S)-3-amino-1-((pent-4-en-1-yloxy)carbonyl)pyrrolidine-3- carboxylic acid
  MOD_RES (12)..(12): (S)-2-amino-3-(2-chlorophenyl)propanoic acid
  MOD_RES (13)..(13): (S)-2-amino-3-(benzo[b]thiophen-3-yl)propanoic acid
  C-term amino
XDXXDDAAFLXFXQ

SEQ ID NO: 801 - protein, 14 aa, Artificial Sequence
  Description of Artificial Sequence: Synthetic peptide
  N-term Acetic Acid
  MOD_RES (1)..(1): (R)-2-allylpyrrolidine-2-carboxylic acid
  MOD_RES (3)..(3): (S)-2-amino-4,4-dimethylpentanoic acid
  MOD_RES (4)..(4): 2-amino-2-(pent-4-en-1-yl)hept-6-enoic acid
  MOD_RES (9)..(9): (S)-2-amino-3-(4-(trifluoromethyl)phenyl)propanoic acid
  MOD_RES (11)..(11): (S)-3-amino-1-((pent-4-en-1-yloxy)carbonyl)pyrrolidine-3- carboxylic acid
  MOD_RES (12)..(12): (S)-2-amino-3-(2-chlorophenyl)propanoic acid
  MOD_RES (13)..(13): (S)-2-amino-3-(benzo[b]thiophen-3-yl)propanoic acid
  C-term amino
XDXXDDAAFLXFXQ

SEQ ID NO: 802 - protein, 14 aa, Artificial Sequence
  Description of Artificial Sequence: Synthetic peptide
  N-term Acetic Acid
  MOD_RES (1)..(1): (R)-2-allylpyrrolidine-2-carboxylic acid
  MOD_RES (3)..(3): (S)-2-amino-3-cyclohexylpropanoic acid
  MOD_RES (4)..(4): 2-amino-2-(pent-4-en-1-yl)hept-6-enoic acid
  MOD_RES (9)..(9): (S)-2-amino-3-(3-methoxyphenyl)propanoic acid
  MOD_RES (11)..(11): (S)-3-amino-1-((pent-4-en-1-yloxy)carbonyl)pyrrolidine-3- carboxylic acid
  MOD_RES (13)..(13): (S)-2-amino-3-(benzo[b]thiophen-3-yl)propanoic acid
  C-term amino
XDXXDDAAFSXFXQ

SEQ ID NO: 803 - protein, 14 aa, Artificial Sequence
  Description of Artificial Sequence: Synthetic peptide
  N-term Acetic Acid
  MOD_RES (1)..(1): (R)-2-allylpyrrolidine-2-carboxylic acid
  MOD_RES (3)..(3): (S)-2-amino-3-cyclohexylpropanoic acid
  MOD_RES (4)..(4): 2-amino-2-(pent-4-en-1-yl)hept-6-enoic acid
  MOD_RES (9)..(9): (S)-2-amino-3-(3-(trifluoromethyl)phenyl)propanoic acid
  MOD_RES (11)..(11): (S)-3-amino-1-((pent-4-en-1-yloxy)carbonyl)pyrrolidine-3- carboxylic acid
  MOD_RES (13)..(13): (S)-2-amino-3-(benzo[b]thiophen-3-yl)propanoic acid
  C-term amino
XDXXDDAAFSXFXQ

SEQ ID NO: 804 - protein, 14 aa, Artificial Sequence
  Description of Artificial Sequence: Synthetic peptide
  N-term Acetic Acid
  MOD_RES (1)..(1): (R)-2-allylpyrrolidine-2-carboxylic acid
  MOD_RES (3)..(3): (S)-2-amino-3-cyclohexylpropanoic acid
  MOD_RES (4)..(4): 2-amino-2-(pent-4-en-1-yl)hept-6-enoic acid
  MOD_RES (9)..(9): (S)-2-amino-3-(4-(trifluoromethyl)phenyl)propanoic acid
  MOD_RES (11)..(11): (S)-3-amino-1-((pent-4-en-1-yloxy)carbonyl)pyrrolidine-3- carboxylic acid
  MOD_RES (13)..(13): (S)-2-amino-3-(benzo[b]thiophen-3-yl)propanoic acid
  C-term amino
XDXXDDAAFSXFXQ

SEQ ID NO: 805 - protein, 14 aa, Artificial Sequence
  Description of Artificial Sequence: Synthetic peptide
  N-term Acetic Acid
  MOD_RES (1)..(1): (R)-2-allylpyrrolidine-2-carboxylic acid
  MOD_RES (3)..(3): (S)-2-amino-4,4-dimethylpentanoic acid
  MOD_RES (4)..(4): 2-amino-2-(pent-4-en-1-yl)hept-6-enoic acid
  MOD_RES (9)..(9): (S)-2-amino-3-(3-methoxyphenyl)propanoic acid
  MOD_RES (11)..(11): (S)-3-amino-1-((pent-4-en-1-yloxy)carbonyl)pyrrolidine-3- carboxylic acid
  MOD_RES (13)..(13): (S)-2-amino-3-(benzo[b]thiophen-3-yl)propanoic acid
  C-term amino
XDXXDDAAFLXFXQ

SEQ ID NO: 806 - protein, 14 aa, Artificial Sequence
  Description of Artificial Sequence: Synthetic peptide
  N-term Acetic Acid
  MOD_RES (1)..(1): (R)-2-allylpyrrolidine-2-carboxylic acid
  MOD_RES (3)..(3): (S)-2-amino-4,4-dimethylpentanoic acid
  MOD_RES (4)..(4): 2-amino-2-(pent-4-en-1-yl)hept-6-enoic acid
  MOD_RES (9)..(9): (S)-2-amino-3-(3-(trifluoromethyl)phenyl)propanoic acid
  MOD_RES (11)..(11): (S)-3-amino-1-((pent-4-en-1-yloxy)carbonyl)pyrrolidine-3- carboxylic acid
  MOD_RES (13)..(13): (S)-2-amino-3-(benzo[b]thiophen-3-yl)propanoic acid
  C-term amino
XDXXDDAAFLXFXQ

SEQ ID NO: 807 - protein, 14 aa, Artificial Sequence
  Description of Artificial Sequence: Synthetic peptide
  N-term Acetic Acid
  MOD_RES (1)..(1): (R)-2-allylpyrrolidine-2-carboxylic acid
  MOD_RES (3)..(3): (S)-2-amino-4,4-dimethylpentanoic acid
  MOD_RES (4)..(4): 2-amino-2-(pent-4-en-1-yl)hept-6-enoic acid
  MOD_RES (9)..(9): (S)-2-amino-3-(4-(trifluoromethyl)phenyl)propanoic acid
  MOD_RES (11)..(11): (S)-3-amino-1-((pent-4-en-1-yloxy)carbonyl)pyrrolidine-3- carboxylic acid
  MOD_RES (13)..(13): (S)-2-amino-3-(benzo[b]thiophen-3-yl)propanoic acid
  C-term amino
XDXXDDAAFLXFXQ

SEQ ID NO: 808 - protein, 14 aa, Artificial Sequence
  Description of Artificial Sequence: Synthetic peptide
  N-term Acetic Acid
  MOD_RES (1)..(1): (R)-2-allylpyrrolidine-2-carboxylic acid
  MOD_RES (3)..(3): (S)-2-amino-4,4-dimethylpentanoic acid
  MOD_RES (4)..(4): 2-amino-2-(pent-4-en-1-yl)hept-6-enoic acid
  MOD_RES (11)..(11): (S)-3-amino-1-((pent-4-en-1-yloxy)carbonyl)pyrrolidine-3- carboxylic acid
  MOD_RES (12)..(12): (S)-2-amino-3-(2-chlorophenyl)propanoic acid
  MOD_RES (13)..(13): (S)-2-amino-3-(benzo[b]thiophen-3-yl)propanoic acid
  MOD_RES (14)..(14): N6-isopropyl-L-lysine
  C-term amino
XDXXDDAAFNXFXK

SEQ ID NO: 809 - protein, 14 aa, Artificial Sequence
  Description of Artificial Sequence: Synthetic peptide
  N-term Acetic Acid
  MOD_RES (1)..(1): (R)-2-allylpyrrolidine-2-carboxylic acid
  MOD_RES (3)..(3): (S)-2-amino-4,4-dimethylpentanoic acid
  MOD_RES (4)..(4): 2-amino-2-(pent-4-en-1-yl)hept-6-enoic acid
  MOD_RES (7)..(7): N6-isopropyl-L-lysine
  MOD_RES (11)..(11): (S)-3-amino-1-((pent-4-en-1-yloxy)carbonyl)pyrrolidine-3- carboxylic acid
  MOD_RES (12)..(12): (S)-2-amino-3-(2-chlorophenyl)propanoic acid
  MOD_RES (13)..(13): (S)-2-amino-3-(benzo[b]thiophen-3-yl)propanoic acid
  C-term amino
XDXXDDKAFNXFXQ

SEQ ID NO: 810 - protein, 14 aa, Artificial Sequence
  Description of Artificial Sequence: Synthetic peptide
  N-term Acetic Acid
  MOD_RES (1)..(1): (R)-2-allylpyrrolidine-2-carboxylic acid
  MOD_RES (3)..(3): (S)-2-amino-4,4-dimethylpentanoic acid
  MOD_RES (4)..(4): 2-amino-2-(pent-4-en-1-yl)hept-6-enoic acid
  MOD_RES (8)..(8): N6-isopropyl-L-lysine
  MOD_RES (11)..(11): (S)-3-amino-1-((pent-4-en-1-yloxy)carbonyl)pyrrolidine-3- carboxylic acid
  MOD_RES (12)..(12): (S)-2-amino-3-(2-chlorophenyl)propanoic acid
  MOD_RES (13)..(13): (S)-2-amino-3-(benzo[b]thiophen-3-yl)propanoic acid
  C-term amino
XDXXDDAKFNXFXQ

SEQ ID NO: 811 - protein, 14 aa, Artificial Sequence
  Description of Artificial Sequence: Synthetic peptide
  N-term Acetic Acid
  MOD_RES (1)..(1): (R)-2-allylpyrrolidine-2-carboxylic acid
  MOD_RES (3)..(3): (S)-2-amino-4,4-dimethylpentanoic acid
  MOD_RES (4)..(4): 2-amino-2-(pent-4-en-1-yl)hept-6-enoic acid
  MOD_RES (11)..(11): (S)-3-amino-1-((pent-4-en-1-yloxy)carbonyl)pyrrolidine-3- carboxylic acid
  MOD_RES (12)..(12): (S)-2-amino-3-(2-chlorophenyl)propanoic acid
  MOD_RES (13)..(13): (S)-2-amino-3-(benzo[b]thiophen-3-yl)propanoic acid
  MOD_RES (14)..(14): (S)-2-amino-3-morpholinopropanoic acid
  C-term amino
XDXXDDAAFNXFXX

SEQ ID NO: 812 - protein, 14 aa, Artificial Sequence
  Description of Artificial Sequence: Synthetic peptide
  N-term Acetic Acid
  MOD_RES (1)..(1): (R)-2-allylpyrrolidine-2-carboxylic acid
  MOD_RES (3)..(3): (S)-2-amino-3-cyclohexylpropanoic acid
  MOD_RES (4)..(4): 2-amino-2-(pent-4-en-1-yl)hept-6-enoic acid
  MOD_RES (11)..(11): (S)-3-amino-1-((pent-4-en-1-yloxy)carbonyl)pyrrolidine-3- carboxylic acid
  MOD_RES (12)..(12): (S)-2-amino-3-(2-chlorophenyl)propanoic acid
  MOD_RES (13)..(13): (S)-2-amino-3-(benzo[b]thiophen-3-yl)propanoic acid
  C-term amino
XDXXDDAAFSXFXT

SEQ ID NO: 813 - protein, 14 aa, Artificial Sequence
  Description of Artificial Sequence: Synthetic peptide
  N-term Acetic Acid
  MOD_RES (1)..(1): (R)-2-allylpyrrolidine-2-carboxylic acid
  MOD_RES (3)..(3): (S)-2-amino-3-cyclohexylpropanoic acid
  MOD_RES (4)..(4): 2-amino-2-(pent-4-en-1-yl)hept-6-enoic acid
  MOD_RES (11)..(11): (S)-3-amino-1-((pent-4-en-1-yloxy)carbonyl)pyrrolidine-3- carboxylic acid
  MOD_RES (12)..(12): (S)-2-amino-3-(2-chlorophenyl)propanoic acid
  MOD_RES (13)..(13): (S)-2-amino-3-(benzo[b]thiophen-3-yl)propanoic acid
  MOD_RES (14)..(14): D-threonine
  C-term amino
XDXXDDAAFSXFXT

SEQ ID NO: 814 - protein, 14 aa, Artificial Sequence
  Description of Artificial Sequence: Synthetic peptide
  N-term Acetic Acid
  MOD_RES (1)..(1): (R)-2-allylpyrrolidine-2-carboxylic acid
  MOD_RES (3)..(3): (S)-2-amino-3-cyclohexylpropanoic acid
  MOD_RES (4)..(4): 2-amino-2-(pent-4-en-1-yl)hept-6-enoic acid
  MOD_RES (11)..(11): (S)-3-amino-1-((pent-4-en-1-yloxy)carbonyl)pyrrolidine-3- carboxylic acid
  MOD_RES (12)..(12): (S)-2-amino-3-(2-chlorophenyl)propanoic acid
  MOD_RES (13)..(13): (S)-2-amino-3-(benzo[b]thiophen-3-yl)propanoic acid
  MOD_RES (14)..(14): L-homoserine
  C-term amino
XDXXDDAAFSXFXS

SEQ ID NO: 815 - protein, 14 aa, Artificial Sequence
  Description of Artificial Sequence: Synthetic peptide
  N-term Acetic Acid
  MOD_RES (1)..(1): (R)-2-allylpyrrolidine-2-carboxylic acid
  MOD_RES (3)..(3): (S)-2-amino-3-cyclohexylpropanoic acid
  MOD_RES (4)..(4): 2-amino-2-(pent-4-en-1-yl)hept-6-enoic acid
  MOD_RES (11)..(11): (S)-3-amino-1-((pent-4-en-1-yloxy)carbonyl)pyrrolidine-3- carboxylic acid
  MOD_RES (12)..(12): (S)-2-amino-3-(2-chlorophenyl)propanoic acid
  MOD_RES (13)..(13): (S)-2-amino-3-(benzo[b]thiophen-3-yl)propanoic acid
  C-term amino
XDXXDDAAFSXFXL

SEQ ID NO: 816 - protein, 14 aa, Artificial Sequence
  Description of Artificial Sequence: Synthetic peptide
  N-term Acetic Acid
  MOD_RES (1)..(1): (R)-2-allylpyrrolidine-2-carboxylic acid
  MOD_RES (3)..(3): (S)-2-amino-3-cyclohexylpropanoic acid
  MOD_RES (4)..(4): 2-amino-2-(pent-4-en-1-yl)hept-6-enoic acid
  MOD_RES (11)..(11): (S)-3-amino-1-((pent-4-en-1-yloxy)carbonyl)pyrrolidine-3- carboxylic acid
  MOD_RES (12)..(12): (S)-2-amino-3-(2-chlorophenyl)propanoic acid
  MOD_RES (13)..(13): (S)-2-amino-3-(benzo[b]thiophen-3-yl)propanoic acid
  C-term amino
XDXXDDAAFLXFXT

SEQ ID NO: 817 - protein, 14 aa, Artificial Sequence
  Description of Artificial Sequence: Synthetic peptide
  N-term Acetic Acid
  MOD_RES (1)..(1): (R)-2-allylpyrrolidine-2-carboxylic acid
  MOD_RES (3)..(3): (S)-2-amino-3-cyclohexylpropanoic acid
  MOD_RES (4)..(4): 2-amino-2-(pent-4-en-1-yl)hept-6-enoic acid
  MOD_RES (11)..(11): (S)-3-amino-1-((pent-4-en-1-yloxy)carbonyl)pyrrolidine-3- carboxylic acid
  MOD_RES (12)..(12): (S)-2-amino-3-(2-chlorophenyl)propanoic acid
  MOD_RES (13)..(13): (S)-2-amino-3-(benzo[b]thiophen-3-yl)propanoic acid
  MOD_RES (14)..(14): D-threonine
  C-term amino
XDXXDDAAFLXFXT

SEQ ID NO: 818 - protein, 14 aa, Artificial Sequence
  Description of Artificial Sequence: Synthetic peptide
  N-term Acetic Acid
  MOD_RES (1)..(1): (R)-2-allylpyrrolidine-2-carboxylic acid
  MOD_RES (4)..(4): 2-amino-2-(pent-4-en-1-yl)hept-6-enoic acid
  MOD_RES (11)..(11): (S)-3-amino-1-((pent-4-en-1-yloxy)carbonyl)pyrrolidine-3- carboxylic acid
  MOD_RES (12)..(12): (S)-2-amino-3-(2-chlorophenyl)propanoic acid
  MOD_RES (13)..(13): (S)-2-amino-3-(benzo[b]thiophen-3-yl)propanoic acid
  C-term amino
XDFXDDAAFSXFXT

SEQ ID NO: 819 - protein, 14 aa, Artificial Sequence
  Description of Artificial Sequence: Synthetic peptide
  N-term Acetic Acid
  MOD_RES (1)..(1): (R)-2-allylpyrrolidine-2-carboxylic acid
  MOD_RES (4)..(4): 2-amino-2-(pent-4-en-1-yl)hept-6-enoic acid
  MOD_RES (11)..(11): (S)-3-amino-1-((pent-4-en-1-yloxy)carbonyl)pyrrolidine-3- carboxylic acid
  MOD_RES (12)..(12): (S)-2-amino-3-(2-chlorophenyl)propanoic acid
  MOD_RES (13)..(13): (S)-2-amino-3-(benzo[b]thiophen-3-yl)propanoic acid
  MOD_RES (14)..(14): D-threonine
  C-term amino
XDFXDDAAFSXFXT

SEQ ID NO: 820 - protein, 14 aa, Artificial Sequence
  Description of Artificial Sequence: Synthetic peptide
  N-term Acetic Acid
  MOD_RES (1)..(1): (R)-2-allylpyrrolidine-2-carboxylic acid
  MOD_RES (4)..(4): 2-amino-2-(pent-4-en-1-yl)hept-6-enoic acid
  MOD_RES (11)..(11): (S)-3-amino-1-((pent-4-en-1-yloxy)carbonyl)pyrrolidine-3- carboxylic acid
  MOD_RES (12)..(12): (S)-2-amino-3-(2-chlorophenyl)propanoic acid
  MOD_RES (13)..(13): (S)-2-amino-3-(benzo[b]thiophen-3-yl)propanoic acid
  MOD_RES (14)..(14): L-homoserine
  C-term amino
XDFXDDAAFSXFXS

SEQ ID NO: 821 - protein, 14 aa, Artificial Sequence
  Description of Artificial Sequence: Synthetic peptide
  N-term Acetic Acid
  MOD_RES (1)..(1): (R)-2-allylpyrrolidine-2-carboxylic acid
  MOD_RES (4)..(4): 2-amino-2-(pent-4-en-1-yl)hept-6-enoic acid
  MOD_RES (11)..(11): (S)-3-amino-1-((pent-4-en-1-yloxy)carbonyl)pyrrolidine-3- carboxylic acid
  MOD_RES (12)..(12): (S)-2-amino-3-(2-chlorophenyl)propanoic acid
  MOD_RES (13)..(13): (S)-2-amino-3-(benzo[b]thiophen-3-yl)propanoic acid
  C-term amino
XDFXDDAAFSXFXL

SEQ ID NO: 822 - protein, 14 aa, Artificial Sequence
  Description of Artificial Sequence: Synthetic peptide
  N-term Acetic Acid
  MOD_RES (1)..(1): (R)-2-allylpyrrolidine-2-carboxylic acid
  MOD_RES (4)..(4): 2-amino-2-(pent-4-en-1-yl)hept-6-enoic acid
  MOD_RES (11)..(11): (S)-3-amino-1-((pent-4-en-1-yloxy)carbonyl)pyrrolidine-3- carboxylic acid
  MOD_RES (12)..(12): (S)-2-amino-3-(2-chlorophenyl)propanoic acid
  MOD_RES (13)..(13): (S)-2-amino-3-(benzo[b]thiophen-3-yl)propanoic acid
  C-term amino
XDFXDDAAFLXFXT

SEQ ID NO: 823 - protein, 14 aa, Artificial Sequence
  Description of Artificial Sequence: Synthetic peptide
  N-term Acetic Acid
  MOD_RES (1)..(1): (R)-2-allylpyrrolidine-2-carboxylic acid
  MOD_RES (4)..(4): 2-amino-2-(pent-4-en-1-yl)hept-6-enoic acid
  MOD_RES (11)..(11): (S)-3-amino-1-((pent-4-en-1-yloxy)carbonyl)pyrrolidine-3- carboxylic acid
  MOD_RES (12)..(12): (S)-2-amino-3-(2-chlorophenyl)propanoic acid
  MOD_RES (13)..(13): (S)-2-amino-3-(benzo[b]thiophen-3-yl)propanoic acid
  MOD_RES (14)..(14): D-threonine
  C-term amino
XDFXDDAAFLXFXT

SEQ ID NO: 824 - protein, 14 aa, Artificial Sequence
  Description of Artificial Sequence: Synthetic peptide
  N-term Acetic Acid
  MOD_RES (1)..(1): (R)-2-allylpyrrolidine-2-carboxylic acid
  MOD_RES (3)..(3): (S)-2-amino-3-cyclohexylpropanoic acid
  MOD_RES (4)..(4): 2-amino-2-(pent-4-en-1-yl)hept-6-enoic acid
  MOD_RES (11)..(11): (S)-3-amino-1-((pent-4-en-1-yloxy)carbonyl)pyrrolidine-3- carboxylic acid
  MOD_RES (12)..(12): (S)-2-amino-3-(2-chlorophenyl)propanoic acid
  MOD_RES (13)..(13): (S)-2-amino-3-(benzo[b]thiophen-3-yl)propanoic acid
  C-term amino
XDXXDDLAFSXFXQ

SEQ ID NO: 825 - protein, 14 aa, Artificial Sequence
  Description of Artificial Sequence: Synthetic peptide
  N-term Acetic Acid
  MOD_RES (1)..(1): (R)-2-allylpyrrolidine-2-carboxylic acid
  MOD_RES (3)..(3): (S)-2-amino-3-cyclohexylpropanoic acid
  MOD_RES (4)..(4): 2-amino-2-(pent-4-en-1-yl)hept-6-enoic acid
  MOD_RES (11)..(11): (S)-3-amino-1-((pent-4-en-1-yloxy)carbonyl)pyrrolidine-3- carboxylic acid
  MOD_RES (12)..(12): (S)-2-amino-3-(2-chlorophenyl)propanoic acid
  MOD_RES (13)..(13): (S)-2-amino-3-(benzo[b]thiophen-3-yl)propanoic acid
  C-term amino
XDXXDDALFSXFXQ

SEQ ID NO: 826 - protein, 14 aa, Artificial Sequence
  Description of Artificial Sequence: Synthetic peptide
  N-term Acetic Acid
  MOD_RES (1)..(1): (R)-2-allylpyrrolidine-2-carboxylic acid
  MOD_RES (3)..(3): (S)-2-amino-3-cyclohexylpropanoic acid
  MOD_RES (4)..(4): 2-amino-2-(pent-4-en-1-yl)hept-6-enoic acid
  MOD_RES (11)..(11): (S)-3-amino-1-((pent-4-en-1-yloxy)carbonyl)pyrrolidine-3- carboxylic acid
  MOD_RES (12)..(12): (S)-2-amino-3-(2-chlorophenyl)propanoic acid
  MOD_RES (13)..(13): (S)-2-amino-3-(benzo[b]thiophen-3-yl)propanoic acid
  C-term amino
XDXXDDLLFSXFXQ

SEQ ID NO: 827 - protein, 14 aa, Artificial Sequence
  Description of Artificial Sequence: Synthetic peptide
  N-term Acetic Acid
  MOD_RES (1)..(1): (R)-2-allylpyrrolidine-2-carboxylic acid
  MOD_RES (3)..(3): (S)-2-amino-3-cyclohexylpropanoic acid
  MOD_RES (4)..(4): 2-amino-2-(pent-4-en-1-yl)hept-6-enoic acid
  MOD_RES (11)..(11): (S)-3-amino-1-((pent-4-en-1-yloxy)carbonyl)pyrrolidine-3- carboxylic acid
  MOD_RES (12)..(12): (S)-2-amino-3-(2-chlorophenyl)propanoic acid
  MOD_RES (13)..(13): (S)-2-amino-3-(benzo[b]thiophen-3-yl)propanoic acid
  C-term amino
XDXXDDLAFTXFXS

SEQ ID NO: 828 - protein, 14 aa, Artificial Sequence
  Description of Artificial Sequence: Synthetic peptide
  N-term Acetic Acid
  MOD_RES (1)..(1): (R)-2-allylpyrrolidine-2-carboxylic acid
  MOD_RES (3)..(3): (S)-2-amino-3-cyclohexylpropanoic acid
  MOD_RES (4)..(4): 2-amino-2-(pent-4-en-1-yl)hept-6-enoic acid
  MOD_RES (11)..(11): (S)-3-amino-1-((pent-4-en-1-yloxy)carbonyl)pyrrolidine-3- carboxylic acid
  MOD_RES (12)..(12): (S)-2-amino-3-(2-chlorophenyl)propanoic acid
  MOD_RES (13)..(13): (S)-2-amino-3-(benzo[b]thiophen-3-yl)propanoic acid
  C-term amino
XDXXDDALFTXFXS

SEQ ID NO: 829 - protein, 14 aa, Artificial Sequence
  Description of Artificial Sequence: Synthetic peptide
  N-term Acetic Acid
  MOD_RES (1)..(1): (R)-2-allylpyrrolidine-2-carboxylic acid
  MOD_RES (3)..(3): (S)-2-amino-3-cyclohexylpropanoic acid
  MOD_RES (4)..(4): 2-amino-2-(pent-4-en-1-yl)hept-6-enoic acid
  MOD_RES (11)..(11): (S)-3-amino-1-((pent-4-en-1-yloxy)carbonyl)pyrrolidine-3- carboxylic acid
  MOD_RES (12)..(12): (S)-2-amino-3-(2-chlorophenyl)propanoic acid
  MOD_RES (13)..(13): (S)-2-amino-3-(benzo[b]thiophen-3-yl)propanoic acid
  C-term amino
XDXXDDLLFTXFXS

SEQ ID NO: 830 - protein, 14 aa, Artificial Sequence
  Description of Artificial Sequence: Synthetic peptide
  N-term Acetic Acid
  MOD_RES (1)..(1): (R)-2-allylpyrrolidine-2-carboxylic acid
  MOD_RES (4)..(4): 2-amino-2-(pent-4-en-1-yl)hept-6-enoic acid
  MOD_RES (11)..(11): (S)-3-amino-1-((pent-4-en-1-yloxy)carbonyl)pyrrolidine-3- carboxylic acid
  MOD_RES (12)..(12): (S)-2-amino-3-(2-chlorophenyl)propanoic acid
  MOD_RES (13)..(13): (S)-2-amino-3-(benzo[b]thiophen-3-yl)propanoic acid
  C-term amino
XDFXDDLAFSXFXQ

SEQ ID NO: 831 - protein, 14 aa, Artificial Sequence
  Description of Artificial Sequence: Synthetic peptide
  N-term Acetic Acid
  MOD_RES (1)..(1): (R)-2-allylpyrrolidine-2-carboxylic acid
  MOD_RES (4)..(4): 2-amino-2-(pent-4-en-1-yl)hept-6-enoic acid
  MOD_RES (11)..(11): (S)-3-amino-1-((pent-4-en-1-yloxy)carbonyl)pyrrolidine-3- carboxylic acid
  MOD_RES (12)..(12): (S)-2-amino-3-(2-chlorophenyl)propanoic acid
  MOD_RES (13)..(13): (S)-2-amino-3-(benzo[b]thiophen-3-yl)propanoic acid
  C-term amino
XDFXDDALFSXFXQ

SEQ ID NO: 832 - protein, 14 aa, Artificial Sequence
  Description of Artificial Sequence: Synthetic peptide
  N-term Acetic Acid
  MOD_RES (1)..(1): (R)-2-allylpyrrolidine-2-carboxylic acid
  MOD_RES (4)..(4): 2-amino-2-(pent-4-en-1-yl)hept-6-enoic acid
  MOD_RES (11)..(11): (S)-3-amino-1-((pent-4-en-1-yloxy)carbonyl)pyrrolidine-3- carboxylic acid
  MOD_RES (12)..(12): (S)-2-amino-3-(2-chlorophenyl)propanoic acid
  MOD_RES (13)..(13): (S)-2-amino-3-(benzo[b]thiophen-3-yl)propanoic acid
  C-term amino
XDFXDDLLFSXFXQ

SEQ ID NO: 833 - protein, 14 aa, Artificial Sequence
  Description of Artificial Sequence: Synthetic peptide
  N-term Acetic Acid
  MOD_RES (1)..(1): (R)-2-allylpyrrolidine-2-carboxylic acid
  MOD_RES (4)..(4): 2-amino-2-(pent-4-en-1-yl)hept-6-enoic acid
  MOD_RES (11)..(11): (S)-3-amino-1-((pent-4-en-1-yloxy)carbonyl)pyrrolidine-3- carboxylic acid
  MOD_RES (12)..(12): (S)-2-amino-3-(2-chlorophenyl)propanoic acid
  MOD_RES (13)..(13): (S)-2-amino-3-(benzo[b]thiophen-3-yl)propanoic acid
  C-term amino
XDFXDDLAFTXFXS

SEQ ID NO: 834 - protein, 14 aa, Artificial Sequence
  Description of Artificial Sequence: Synthetic peptide
  N-term Acetic Acid
  MOD_RES (1)..(1): (R)-2-allylpyrrolidine-2-carboxylic acid
  MOD_RES (4)..(4): 2-amino-2-(pent-4-en-1-yl)hept-6-enoic acid
  MOD_RES (11)..(11): (S)-3-amino-1-((pent-4-en-1-yloxy)carbonyl)pyrrolidine-3- carboxylic acid
  MOD_RES (12)..(12): (S)-2-amino-3-(2-chlorophenyl)propanoic acid
  MOD_RES (13)..(13): (S)-2-amino-3-(benzo[b]thiophen-3-yl)propanoic acid
  C-term amino
XDFXDDALFTXFXS

SEQ ID NO: 835 - protein, 14 aa, Artificial Sequence
  Description of Artificial Sequence: Synthetic peptide
  N-term Acetic Acid
  MOD_RES (1)..(1): (R)-2-allylpyrrolidine-2-carboxylic acid
  MOD_RES (4)..(4): 2-amino-2-(pent-4-en-1-yl)hept-6-enoic acid
  MOD_RES (11)..(11): (S)-3-amino-1-((pent-4-en-1-yloxy)carbonyl)pyrrolidine-3- carboxylic acid
  MOD_RES (12)..(12): (S)-2-amino-3-(2-chlorophenyl)propanoic acid
  MOD_RES (13)..(13): (S)-2-amino-3-(benzo[b]thiophen-3-yl)propanoic acid
  C-term amino
XDFXDDLLFTXFXS

SEQ ID NO: 836 - protein, 14 aa, Artificial Sequence
  Description of Artificial Sequence: Synthetic peptide
  N-term Acetic Acid
  MOD_RES (1)..(1): (R)-2-allylpyrrolidine-2-carboxylic acid
  MOD_RES (2)..(2): 3-aminopentanedioic acid
  MOD_RES (3)..(3): (S)-2-amino-4,4-dimethylpentanoic acid
  MOD_RES (4)..(4): 2-amino-2-(pent-4-en-1-yl)hept-6-enoic acid
  MOD_RES (11)..(11): (S)-3-amino-1-((pent-4-en-1-yloxy)carbonyl)pyrrolidine-3- carboxylic acid
  MOD_RES (12)..(12): (S)-2-amino-3-(thiophen-3-yl)propanoic acid
  MOD_RES (13)..(13): (S)-2-amino-3-(benzo[b]thiophen-3-yl)propanoic acid
  C-term amino
XXXXDDAAFNXXXQ

SEQ ID NO: 837 - protein, 14 aa, Artificial Sequence
  Description of Artificial Sequence: Synthetic peptide
  N-term Acetic Acid
  MOD_RES (1)..(1): (R)-2-allylpyrrolidine-2-carboxylic acid
  MOD_RES (2)..(2): methyl-L-aspartic acid
  MOD_RES (3)..(3): (S)-2-amino-4,4-dimethylpentanoic acid
  MOD_RES (4)..(4): 2-amino-2-(pent-4-en-1-yl)hept-6-enoic acid
  MOD_RES (11)..(11): (S)-3-amino-1-((pent-4-en-1-yloxy)carbonyl)pyrrolidine-3- carboxylic acid
  MOD_RES (12)..(12): (S)-2-amino-3-(thiophen-3-yl)propanoic acid
  MOD_RES (13)..(13): (S)-2-amino-3-(benzo[b]thiophen-3-yl)propanoic acid
  C-term amino
XDXXDDAAFNXXXQ

SEQ ID NO: 838 - protein, 14 aa, Artificial Sequence
  Description of Artificial Sequence: Synthetic peptide
  N-term Acetic Acid
  MOD_RES (1)..(1): (R)-2-allylpyrrolidine-2-carboxylic acid
  MOD_RES (2)..(2): 3-aminopentanedioic acid
  MOD_RES (3)..(3): (S)-2-amino-4,4-dimethylpentanoic acid
  MOD_RES (4)..(4): 2-amino-2-(pent-4-en-1-yl)hept-6-enoic acid
  MOD_RES (6)..(6): (S)-2-amino-3-((carboxymethyl)(2,2,2-trifluoroethyl)amino) propanoic acid
  MOD_RES (11)..(11): (S)-3-amino-1-((pent-4-en-1-yloxy)carbonyl)pyrrolidine-3- carboxylic acid
  MOD_RES (12)..(12): (S)-2-amino-3-(thiophen-3-yl)propanoic acid
  MOD_RES (13)..(13): (S)-2-amino-3-(benzo[b]thiophen-3-yl)propanoic acid
  C-term amino
XXXXDXAAFNXXXQ

SEQ ID NO: 839 - protein, 14 aa, Artificial Sequence
  Description of Artificial Sequence: Synthetic peptide
  N-term Acetic Acid
  MOD_RES (1)..(1): (R)-2-allylpyrrolidine-2-carboxylic acid
  MOD_RES (2)..(2): methyl-L-aspartic acid
  MOD_RES (3)..(3): (S)-2-amino-4,4-dimethylpentanoic acid
  MOD_RES (4)..(4): 2-amino-2-(pent-4-en-1-yl)hept-6-enoic acid
  MOD_RES (6)..(6): (S)-2-amino-3-((carboxymethyl)(2,2,2-trifluoroethyl)amino) propanoic acid
  MOD_RES (11)..(11): (S)-3-amino-1-((pent-4-en-1-yloxy)carbonyl)pyrrolidine-3- carboxylic acid
  MOD_RES (12)..(12): (S)-2-amino-3-(thiophen-3-yl)propanoic acid
  MOD_RES (13)..(13): (S)-2-amino-3-(benzo[b]thiophen-3-yl)propanoic acid
  C-term amino
XDXXDXAAFNXXXQ

SEQ ID NO: 840 - protein, 14 aa, Artificial Sequence
  Description of Artificial Sequence: Synthetic peptide
  N-term Acetic Acid
  MOD_RES (1)..(1): (R)-2-allylpyrrolidine-2-carboxylic acid
  MOD_RES (2)..(2): 3-aminopentanedioic acid
  MOD_RES (3)..(3): (S)-2-amino-4,4-dimethylpentanoic acid
  MOD_RES (4)..(4): 2-amino-2-(pent-4-en-1-yl)hept-6-enoic acid
  MOD_RES (11)..(11): (S)-2-amino-2-methyldec-9-enoic acid
  MOD_RES (12)..(12): (S)-2-amino-3-(thiophen-3-yl)propanoic acid
  MOD_RES (13)..(13): (S)-2-amino-3-(benzo[b]thiophen-3-yl)propanoic acid
  C-term amino
XXXXDDAAFNXXXQ

SEQ ID NO: 841 - protein, 14 aa, Artificial Sequence
  Description of Artificial Sequence: Synthetic peptide
  N-term Acetic Acid
  MOD_RES (1)..(1): (R)-2-allylpyrrolidine-2-carboxylic acid
  MOD_RES (2)..(2): methyl-L-aspartic acid
  MOD_RES (3)..(3): (S)-2-amino-4,4-dimethylpentanoic acid
  MOD_RES (4)..(4): 2-amino-2-(pent-4-en-1-yl)hept-6-enoic acid
  MOD_RES (11)..(11): (S)-2-amino-2-methyldec-9-enoic acid
  MOD_RES (12)..(12): (S)-2-amino-3-(thiophen-3-yl)propanoic acid
  MOD_RES (13)..(13): (S)-2-amino-3-(benzo[b]thiophen-3-yl)propanoic acid
  C-term amino
XDXXDDAAFNXXXQ

SEQ ID NO: 842 - protein, 14 aa, Artificial Sequence
  Description of Artificial Sequence: Synthetic peptide
  N-term Acetic Acid
  MOD_RES (1)..(1): (R)-2-allylpyrrolidine-2-carboxylic acid
  MOD_RES (3)..(3): (S)-2-amino-4,4-dimethylpentanoic acid
  MOD_RES (4)..(4): 2-amino-2-(pent-4-en-1-yl)hept-6-enoic acid
  MOD_RES (11)..(11): (S)-3-amino-1-((pent-4-en-1-yloxy)carbonyl)pyrrolidine-3- carboxylic acid
  MOD_RES (12)..(12): (S)-2-amino-3-(thiophen-3-yl)propanoic acid
  MOD_RES (13)..(13): (S)-2-amino-3-(benzo[b]thiophen-3-yl)propanoic acid
  C-term amino
XDXXDTAAFTXXXQ

SEQ ID NO: 843 - protein, 14 aa, Artificial Sequence
  Description of Artificial Sequence: Synthetic peptide
  N-term Acetic Acid
  MOD_RES (1)..(1): (R)-2-allylpyrrolidine-2-carboxylic acid
  MOD_RES (3)..(3): (S)-2-amino-4,4-dimethylpentanoic acid
  MOD_RES (4)..(4): 2-amino-2-(pent-4-en-1-yl)hept-6-enoic acid
  MOD_RES (11)..(11): (S)-3-amino-1-((pent-4-en-1-yloxy)carbonyl)pyrrolidine-3- carboxylic acid
  MOD_RES (12)..(12): (S)-2-amino-3-(thiophen-3-yl)propanoic acid
  MOD_RES (13)..(13): (S)-2-amino-3-(benzo[b]thiophen-3-yl)propanoic acid
  C-term amino
XDXXDTAAFLXXXQ

SEQ ID NO: 844 - protein, 14 aa, Artificial Sequence
  Description of Artificial Sequence: Synthetic peptide
  N-term Acetic Acid
  MOD_RES (1)..(1): (R)-2-allylpyrrolidine-2-carboxylic acid
  MOD_RES (3)..(3): (S)-2-amino-4,4-dimethylpentanoic acid
  MOD_RES (4)..(4): 2-amino-2-(pent-4-en-1-yl)hept-6-enoic acid
  MOD_RES (11)..(11): (S)-3-amino-1-((pent-4-en-1-yloxy)carbonyl)pyrrolidine-3- carboxylic acid
  MOD_RES (12)..(12): (S)-2-amino-3-(2-chlorophenyl)propanoic acid
  MOD_RES (13)..(13): (S)-2-amino-3-(benzo[b]thiophen-3-yl)propanoic acid
  C-term amino
XDXXDTAAFTXFXQ

SEQ ID NO: 845 - protein, 14 aa, Artificial Sequence
  Description of Artificial Sequence: Synthetic peptide
  N-term Acetic Acid
  MOD_RES (1)..(1): (R)-2-allylpyrrolidine-2-carboxylic acid
  MOD_RES (3)..(3): (S)-2-amino-4,4-dimethylpentanoic acid
  MOD_RES (4)..(4): 2-amino-2-(pent-4-en-1-yl)hept-6-enoic acid
  MOD_RES (11)..(11): (S)-3-amino-1-((pent-4-en-1-yloxy)carbonyl)pyrrolidine-3- carboxylic acid
  MOD_RES (12)..(12): (S)-2-amino-3-(2-chlorophenyl)propanoic acid
  MOD_RES (13)..(13): (S)-2-amino-3-(benzo[b]thiophen-3-yl)propanoic acid
  C-term amino
XDXXDTAAFLXFXQ

SEQ ID NO: 846 - protein, 14 aa, Artificial Sequence
  Description of Artificial Sequence: Synthetic peptide
  N-term Acetic Acid
  MOD_RES (1)..(1): (R)-2-allylpyrrolidine-2-carboxylic acid
  MOD_RES (3)..(3): (S)-2-amino-4,4-dimethylpentanoic acid
  MOD_RES (4)..(4): 2-amino-2-(pent-4-en-1-yl)hept-6-enoic acid
  MOD_RES (11)..(11): (S)-3-amino-1-((pent-4-en-1-yloxy)carbonyl)pyrrolidine-3- carboxylic acid
  MOD_RES (12)..(12): (S)-2-amino-3-(thiophen-3-yl)propanoic acid
  MOD_RES (13)..(13): (S)-2-amino-3-(benzo[b]thiophen-3-yl)propanoic acid
  C-term amino
XDXXDTAAFTXXXS

SEQ ID NO: 847 - protein, 14 aa, Artificial Sequence
  Description of Artificial Sequence: Synthetic peptide
  N-term Acetic Acid
  MOD_RES (1)..(1): (R)-2-allylpyrrolidine-2-carboxylic acid
  MOD_RES (3)..(3): (S)-2-amino-4,4-dimethylpentanoic acid
  MOD_RES (4)..(4): 2-amino-2-(pent-4-en-1-yl)hept-6-enoic acid
  MOD_RES (11)..(11): (S)-3-amino-1-((pent-4-en-1-yloxy)carbonyl)pyrrolidine-3- carboxylic acid
  MOD_RES (12)..(12): (S)-2-amino-3-(thiophen-3-yl)propanoic acid
  MOD_RES (13)..(13): (S)-2-amino-3-(benzo[b]thiophen-3-yl)propanoic acid
  C-term amino
XDXXDTAAFLXXXS

SEQ ID NO: 848 - protein, 14 aa, Artificial Sequence
  Description of Artificial Sequence: Synthetic peptide
  N-term Acetic Acid
  MOD_RES (1)..(1): (R)-2-allylpyrrolidine-2-carboxylic acid
  MOD_RES (3)..(3): (S)-2-amino-4,4-dimethylpentanoic acid
  MOD_RES (4)..(4): 2-amino-2-(pent-4-en-1-yl)hept-6-enoic acid
  MOD_RES (11)..(11): (S)-3-amino-1-((pent-4-en-1-yloxy)carbonyl)pyrrolidine-3- carboxylic acid
  MOD_RES (12)..(12): (S)-2-amino-3-(2-chlorophenyl)propanoic acid
  MOD_RES (13)..(13): (S)-2-amino-3-(benzo[b]thiophen-3-yl)propanoic acid
  C-term amino
XDXXDTAAFLXFXS

SEQ ID NO: 849 - protein, 14 aa, Artificial Sequence
  Description of Artificial Sequence: Synthetic peptide
  N-term Acetic Acid
  MOD_RES (1)..(1): (R)-2-allylpyrrolidine-2-carboxylic acid
  MOD_RES (3)..(3): (S)-2-amino-3-cyclohexylpropanoic acid
  MOD_RES (4)..(4): 2-amino-2-(pent-4-en-1-yl)hept-6-enoic acid
  MOD_RES (11)..(11): (S)-3-amino-1-((pent-4-en-1-yloxy)carbonyl)pyrrolidine-3- carboxylic acid
  MOD_RES (12)..(12): (S)-2-amino-3-(thiophen-3-yl)propanoic acid
  MOD_RES (13)..(13): (S)-2-amino-3-(benzo[b]thiophen-3-yl)propanoic acid
  C-term amino
XDXXDTAAFTXXXQ

SEQ ID NO: 850 - protein, 14 aa, Artificial Sequence
  Description of Artificial Sequence: Synthetic peptide
  N-term Acetic Acid
  MOD_RES (1)..(1): (R)-2-allylpyrrolidine-2-carboxylic acid
  MOD_RES (3)..(3): (S)-2-amino-3-cyclohexylpropanoic acid
  MOD_RES (4)..(4): 2-amino-2-(pent-4-en-1-yl)hept-6-enoic acid
  MOD_RES (11)..(11): (S)-3-amino-1-((pent-4-en-1-yloxy)carbonyl)pyrrolidine-3- carboxylic acid
  MOD_RES (12)..(12): (S)-2-amino-3-(thiophen-3-yl)propanoic acid
  MOD_RES (13)..(13): (S)-2-amino-3-(benzo[b]thiophen-3-yl)propanoic acid
  C-term amino
XDXXDTAAFLXXXQ

SEQ ID NO: 851 - protein, 14 aa, Artificial Sequence
  Description of Artificial Sequence: Synthetic peptide
  N-term Acetic Acid
  MOD_RES (1)..(1): (R)-2-allylpyrrolidine-2-carboxylic acid
  MOD_RES (3)..(3): (S)-2-amino-3-cyclohexylpropanoic acid
  MOD_RES (4)..(4): 2-amino-2-(pent-4-en-1-yl)hept-6-enoic acid
  MOD_RES (11)..(11): (S)-3-amino-1-((pent-4-en-1-yloxy)carbonyl)pyrrolidine-3- carboxylic acid
  MOD_RES (12)..(12): (S)-2-amino-3-(2-chlorophenyl)propanoic acid
  MOD_RES (13)..(13): (S)-2-amino-3-(benzo[b]thiophen-3-yl)propanoic acid
  C-term amino
XDXXDTAAFTXFXQ

SEQ ID NO: 852 - protein, 14 aa, Artificial Sequence
  Description of Artificial Sequence: Synthetic peptide
  N-term Acetic Acid
  MOD_RES (1)..(1): (R)-2-allylpyrrolidine-2-carboxylic acid
  MOD_RES (3)..(3): (S)-2-amino-3-cyclohexylpropanoic acid
  MOD_RES (4)..(4): 2-amino-2-(pent-4-en-1-yl)hept-6-enoic acid
  MOD_RES (11)..(11): (S)-3-amino-1-((pent-4-en-1-yloxy)carbonyl)pyrrolidine-3- carboxylic acid
  MOD_RES (12)..(12): (S)-2-amino-3-(2-chlorophenyl)propanoic acid
  MOD_RES (13)..(13): (S)-2-amino-3-(benzo[b]thiophen-3-yl)propanoic acid
  C-term amino
XDXXDTAAFLXFXQ

SEQ ID NO: 853 - protein, 14 aa, Artificial Sequence
  Description of Artificial Sequence: Synthetic peptide
  N-term Acetic Acid
  MOD_RES (1)..(1): (R)-2-allylpyrrolidine-2-carboxylic acid
  MOD_RES (3)..(3): (S)-2-amino-4,4-dimethylpentanoic acid
  MOD_RES (4)..(4): 2-amino-2-(pent-4-en-1-yl)hept-6-enoic acid
  MOD_RES (7)..(7): 2-amino-2-methylpropanoic acid
  MOD_RES (11)..(11): (S)-3-amino-1-((pent-4-en-1-yloxy)carbonyl)pyrrolidine-3- carboxylic acid
  MOD_RES (12)..(12): (S)-2-amino-3-(thiophen-3-yl)propanoic acid
  MOD_RES (13)..(13): (S)-2-amino-3-(benzo[b]thiophen-3-yl)propanoic acid
  C-term amino
XDXXDDXAFLXXXQ

SEQ ID NO: 854 - protein, 14 aa, Artificial Sequence
  Description of Artificial Sequence: Synthetic peptide
  N-term Acetic Acid
  MOD_RES (1)..(1): (R)-2-allylpyrrolidine-2-carboxylic acid
  MOD_RES (3)..(3): (S)-2-amino-4,4-dimethylpentanoic acid
  MOD_RES (4)..(4): 2-amino-2-(pent-4-en-1-yl)hept-6-enoic acid
  MOD_RES (8)..(8): 2-amino-2-methylpropanoic acid
  MOD_RES (11)..(11): (S)-3-amino-1-((pent-4-en-1-yloxy)carbonyl)pyrrolidine-3- carboxylic acid
  MOD_RES (12)..(12): (S)-2-amino-3-(thiophen-3-yl)propanoic acid
  MOD_RES (13)..(13): (S)-2-amino-3-(benzo[b]thiophen-3-yl)propanoic acid
  C-term amino
XDXXDDAXFLXXXQ

SEQ ID NO: 855 - protein, 14 aa, Artificial Sequence
  Description of Artificial Sequence: Synthetic peptide
  N-term Acetic Acid
  MOD_RES (1)..(1): (R)-2-allylpyrrolidine-2-carboxylic acid
  MOD_RES (3)..(3): (S)-2-amino-4,4-dimethylpentanoic acid
  MOD_RES (4)..(4): 2-amino-2-(pent-4-en-1-yl)hept-6-enoic acid
  MOD_RES (7)..(7): 2-amino-2-methylpropanoic acid
  MOD_RES (8)..(8): 2-amino-2-methylpropanoic acid
  MOD_RES (11)..(11): (S)-3-amino-1-((pent-4-en-1-yloxy)carbonyl)pyrrolidine-3- carboxylic acid
  MOD_RES (12)..(12): (S)-2-amino-3-(thiophen-3-yl)propanoic acid
  MOD_RES (13)..(13): (S)-2-amino-3-(benzo[b]thiophen-3-yl)propanoic acid
  C-term amino
XDXXDDXXFLXXXQ

SEQ ID NO: 856 - protein, 14 aa, Artificial Sequence
  Description of Artificial Sequence: Synthetic peptide
  N-term Acetic Acid
  MOD_RES (3)..(3): (S)-2-amino-4,4-dimethylpentanoic acid
  MOD_RES (4)..(4): (R)-2-amino-2-methylhept-6-enoic acid
  MOD_RES (11)..(11): (S)-3-amino-1-((pent-4-en-1-yloxy)carbonyl)pyrrolidine-3- carboxylic acid
  MOD_RES (12)..(12): (S)-2-amino-3-(thiophen-3-yl)propanoic acid
  MOD_RES (13)..(13): (S)-2-amino-3-(benzo[b]thiophen-3-yl)propanoic acid
  C-term amino
PDXXDDAAFLXXXQ

SEQ ID NO: 857 - protein, 14 aa, Artificial Sequence
  Description of Artificial Sequence: Synthetic peptide
  N-term Acetic Acid
  MOD_RES (3)..(3): (S)-2-amino-4,4-dimethylpentanoic acid
  MOD_RES (4)..(4): (R)-2-amino-2-methylhept-6-enoic acid
  MOD_RES (11)..(11): (S)-3-amino-1-((pent-4-en-1-yloxy)carbonyl)pyrrolidine-3- carboxylic acid
  MOD_RES (12)..(12): (S)-2-amino-3-(thiophen-3-yl)propanoic acid
  MOD_RES (13)..(13): (S)-2-amino-3-(benzo[b]thiophen-3-yl)propanoic acid
  C-term amino
PDXXDDAAFNXXXQ

SEQ ID NO: 858 - protein, 14 aa, Artificial Sequence
  Description of Artificial Sequence: Synthetic peptide
  N-term Acetic Acid
  MOD_RES (3)..(3): (S)-2-amino-4,4-dimethylpentanoic acid
  MOD_RES (4)..(4): (R)-2-amino-2-methylhept-6-enoic acid
  MOD_RES (11)..(11): (S)-3-amino-1-((pent-4-en-1-yloxy)carbonyl)pyrrolidine-3- carboxylic acid
  MOD_RES (12)..(12): (S)-2-amino-3-(2-chlorophenyl)propanoic acid
  MOD_RES (13)..(13): (S)-2-amino-3-(benzo[b]thiophen-3-yl)propanoic acid
  C-term amino
PDXXDDAAFNXFXQ

SEQ ID NO: 859 - protein, 14 aa, Artificial Sequence
  Description of Artificial Sequence: Synthetic peptide
  N-term Acetic Acid
  MOD_RES (3)..(3): (S)-2-amino-3-cyclohexylpropanoic acid
  MOD_RES (4)..(4): (R)-2-amino-2-methylhept-6-enoic acid
  MOD_RES (11)..(11): (S)-3-amino-1-((pent-4-en-1-yloxy)carbonyl)pyrrolidine-3- carboxylic acid
  MOD_RES (12)..(12): (S)-2-amino-3-(2-chlorophenyl)propanoic acid
  MOD_RES (13)..(13): (S)-2-amino-3-(benzo[b]thiophen-3-yl)propanoic acid
  C-term amino
PDXXDDAAFTXFXS

SEQ ID NO: 860 - protein, 14 aa, Artificial Sequence
  Description of Artificial Sequence: Synthetic peptide
  N-term Acetic Acid
  MOD_RES (1)..(1): (R)-2-allylpyrrolidine-2-carboxylic acid
  MOD_RES (3)..(3): (S)-2-amino-4,4-dimethylpentanoic acid
  MOD_RES (4)..(4): 2-amino-2-(pent-4-en-1-yl)hept-6-enoic acid
  MOD_RES (11)..(11): (S)-3-amino-1-((pent-4-en-1-yloxy)carbonyl)pyrrolidine-3- carboxylic acid
  MOD_RES (12)..(12): (S)-2-amino-3-(perfluorophenyl)propanoic acid
  MOD_RES (13)..(13): (S)-2-amino-3-(benzo[b]thiophen-3-yl)propanoic acid
  C-term amino
XDXXDDAAFLXFXQ

SEQ ID NO: 861 - protein, 14 aa, Artificial Sequence
  Description of Artificial Sequence: Synthetic peptide
  N-term Acetic Acid
  MOD_RES (1)..(1): (R)-2-allylpyrrolidine-2-carboxylic acid
  MOD_RES (3)..(3): (S)-2-amino-4,4-dimethylpentanoic acid
  MOD_RES (4)..(4): 2-amino-2-(pent-4-en-1-yl)hept-6-enoic acid
  MOD_RES (11)..(11): (S)-3-amino-1-((pent-4-en-1-yloxy)carbonyl)pyrrolidine-3- carboxylic acid
  MOD_RES (12)..(12): (S)-2-amino-3-(perfluorophenyl)propanoic acid
  MOD_RES (13)..(13): (S)-2-amino-3-(benzo[b]thiophen-3-yl)propanoic acid
  C-term amino
XDXXDDAAFNXFXQ

SEQ ID NO: 862 - protein, 14 aa, Artificial Sequence
  Description of Artificial Sequence: Synthetic peptide
  N-term Acetic Acid
  MOD_RES (1)..(1): (R)-2-allylpyrrolidine-2-carboxylic acid
  MOD_RES (3)..(3): (S)-2-amino-3-cyclohexylpropanoic acid
  MOD_RES (4)..(4): 2-amino-2-(pent-4-en-1-yl)hept-6-enoic acid
  MOD_RES (11)..(11): (S)-3-amino-1-((pent-4-en-1-yloxy)carbonyl)pyrrolidine-3- carboxylic acid
  MOD_RES (12)..(12): (S)-2-amino-3-(perfluorophenyl)propanoic acid
  MOD_RES (13)..(13): (S)-2-amino-3-(benzo[b]thiophen-3-yl)propanoic acid
  C-term amino
XDXXDDAAFTXFXS

SEQ ID NO: 863 - protein, 14 aa, Artificial Sequence
  Description of Artificial Sequence: Synthetic peptide
  N-term Acetic Acid
  MOD_RES (1)..(1): (R)-2-allylpyrrolidine-2-carboxylic acid
  MOD_RES (3)..(3): (S)-2-amino-4,4-dimethylpentanoic acid
  MOD_RES (4)..(4): 2-amino-2-(pent-4-en-1-yl)hept-6-enoic acid
  MOD_RES (11)..(11): (S)-2-amino-2-methyldec-9-enoic acid
  MOD_RES (12)..(12): (S)-2-amino-3-(thiophen-3-yl)propanoic acid
  MOD_RES (13)..(13): (S)-2-amino-3-(benzo[b]thiophen-3-yl)propanoic acid
  C-term amino
XDXXDDAAFLXXXQ

SEQ ID NO: 864 - protein, 14 aa, Artificial Sequence
  Description of Artificial Sequence: Synthetic peptide
  N-term Acetic Acid
  MOD_RES (1)..(1): (R)-2-allylpyrrolidine-2-carboxylic acid
  MOD_RES (3)..(3): (S)-2-amino-4,4-dimethylpentanoic acid
  MOD_RES (4)..(4): 2-amino-2-(pent-4-en-1-yl)hept-6-enoic acid
  MOD_RES (11)..(11): (S)-2-amino-2-methyldec-9-enoic acid
  MOD_RES (12)..(12): (S)-2-amino-3-(2-chlorophenyl)propanoic acid
  MOD_RES (13)..(13): (S)-2-amino-3-(benzo[b]thiophen-3-yl)propanoic acid
  C-term amino
XDXXDDAAFLXFXS

SEQ ID NO: 865 - protein, 14 aa, Artificial Sequence
  Description of Artificial Sequence: Synthetic peptide
  N-term Acetic Acid
  MOD_RES (1)..(1): (R)-2-allylpyrrolidine-2-carboxylic acid
  MOD_RES (3)..(3): (S)-2-amino-4,4-dimethylpentanoic acid
  MOD_RES (4)..(4): 2-amino-2-(pent-4-en-1-yl)hept-6-enoic acid
  MOD_RES (11)..(11): (S)-2-amino-2-methyldec-9-enoic acid
  MOD_RES (12)..(12): (S)-2-amino-3-(thiophen-3-yl)propanoic acid
  MOD_RES (13)..(13): (S)-2-amino-3-(benzo[b]thiophen-3-yl)propanoic acid
  C-term amino
XDXXDDAAFLXXXS

SEQ ID NO: 866 - protein, 14 aa, Artificial Sequence
  Description of Artificial Sequence: Synthetic peptide
  N-term Acetic Acid
  MOD_RES (1)..(1): (R)-2-allylpyrrolidine-2-carboxylic acid
  MOD_RES (3)..(3): (S)-2-amino-4,4-dimethylpentanoic acid
  MOD_RES (4)..(4): 2-amino-2-(pent-4-en-1-yl)hept-6-enoic acid
  MOD_RES (11)..(11): (S)-2-amino-2-methyldec-9-enoic acid
  MOD_RES (12)..(12): (S)-2-amino-3-(thiophen-3-yl)propanoic acid
  MOD_RES (13)..(13): (S)-2-amino-3-(benzo[b]thiophen-3-yl)propanoic acid
  C-term amino
XDXXDDAAFLXXXT

SEQ ID NO: 867 - protein, 14 aa, Artificial Sequence
  Description of Artificial Sequence: Synthetic peptide
  N-term Acetic Acid
  MOD_RES (1)..(1): (R)-2-allylpyrrolidine-2-carboxylic acid
  MOD_RES (3)..(3): (S)-2-amino-4,4-dimethylpentanoic acid
  MOD_RES (4)..(4): 2-amino-2-(pent-4-en-1-yl)hept-6-enoic acid
  MOD_RES (11)..(11): (S)-2-amino-2-methyldec-9-enoic acid
  MOD_RES (12)..(12): (S)-2-amino-3-(2-chlorophenyl)propanoic acid
  MOD_RES (13)..(13): (S)-2-amino-3-(benzo[b]thiophen-3-yl)propanoic acid
  MOD_RES (14)..(14): (S)-2-amino-3-(1H-1,2,3-triazol-4-yl)propanoic acid
  C-term amino
XDXXDDAAFLXFXX

SEQ ID NO: 868 - protein, 14 aa, Artificial Sequence
  Description of Artificial Sequence: Synthetic peptide
  N-term Acetic Acid
  MOD_RES (1)..(1): (R)-2-allylpyrrolidine-2-carboxylic acid
  MOD_RES (3)..(3): (S)-2-amino-4,4-dimethylpentanoic acid
  MOD_RES (4)..(4): 2-amino-2-(pent-4-en-1-yl)hept-6-enoic acid
  MOD_RES (11)..(11): (S)-2-amino-2-methyldec-9-enoic acid
  MOD_RES (12)..(12): (S)-2-amino-3-(thiophen-3-yl)propanoic acid
  MOD_RES (13)..(13): (S)-2-amino-3-(benzo[b]thiophen-3-yl)propanoic acid
  MOD_RES (14)..(14): (S)-2-amino-3-(1H-1,2,3-triazol-4-yl)propanoic acid
  C-term amino
XDXXDDAAFLXXXX

SEQ ID NO: 869 - protein, 14 aa, Artificial Sequence
  Description of Artificial Sequence: Synthetic peptide
  N-term Acetic Acid
  MOD_RES (1)..(1): (R)-2-allylpyrrolidine-2-carboxylic acid
  MOD_RES (3)..(3): (S)-2-amino-4,4-dimethylpentanoic acid
  MOD_RES (4)..(4): 2-amino-2-(pent-4-en-1-yl)hept-6-enoic acid
  MOD_RES (11)..(11): (S)-2-amino-2-methyldec-9-enoic acid
  MOD_RES (12)..(12): (S)-2-amino-3-(2-chlorophenyl)propanoic acid
  MOD_RES (13)..(13): (S)-2-amino-3-(benzo[b]thiophen-3-yl)propanoic acid
  C-term amino
XDXXDDAAFLXFXH

SEQ ID NO: 870 - protein, 14 aa, Artificial Sequence
  Description of Artificial Sequence: Synthetic peptide
  N-term Acetic Acid
  MOD_RES (1)..(1): (R)-2-allylpyrrolidine-2-carboxylic acid
  MOD_RES (3)..(3): (S)-2-amino-4,4-dimethylpentanoic acid
  MOD_RES (4)..(4): 2-amino-2-(pent-4-en-1-yl)hept-6-enoic acid
  MOD_RES (11)..(11): (S)-2-amino-2-methyldec-9-enoic acid
  MOD_RES (12)..(12): (S)-2-amino-3-(thiophen-3-yl)propanoic acid
  MOD_RES (13)..(13): (S)-2-amino-3-(benzo[b]thiophen-3-yl)propanoic acid
  C-term amino
XDXXDDAAFLXXXH

SEQ ID NO: 871 - protein, 14 aa, Artificial Sequence
  Description of Artificial Sequence: Synthetic peptide
  N-term Acetic Acid
  MOD_RES (1)..(1): (R)-2-allylpyrrolidine-2-carboxylic acid
  MOD_RES (3)..(3): (S)-2-amino-4,4-dimethylpentanoic acid
  MOD_RES (4)..(4): 2-amino-2-(pent-4-en-1-yl)hept-6-enoic acid
  MOD_RES (11)..(11): (S)-2-amino-2-methyldec-9-enoic acid
  MOD_RES (12)..(12): (S)-2-amino-3-(2-chlorophenyl)propanoic acid
  MOD_RES (13)..(13): (S)-2-amino-3-(benzo[b]thiophen-3-yl)propanoic acid
  MOD_RES (14)..(14): L-homoserine
  C-term amino
XDXXDDAAFLXFXS

SEQ ID NO: 872 - protein, 14 aa, Artificial Sequence
  Description of Artificial Sequence: Synthetic peptide
  N-term Acetic Acid
  MOD_RES (1)..(1): (R)-2-allylpyrrolidine-2-carboxylic acid
  MOD_RES (3)..(3): (S)-2-amino-4,4-dimethylpentanoic acid
  MOD_RES (4)..(4): 2-amino-2-(pent-4-en-1-yl)hept-6-enoic acid
  MOD_RES (11)..(11): (S)-2-amino-2-methyldec-9-enoic acid
  MOD_RES (12)..(12): (S)-2-amino-3-(thiophen-3-yl)propanoic acid
  MOD_RES (13)..(13): (S)-2-amino-3-(benzo[b]thiophen-3-yl)propanoic acid
  MOD_RES (14)..(14): L-homoserine
  C-term amino
XDXXDDAAFLXXXS

SEQ ID NO: 873 - protein, 14 aa, Artificial Sequence
  Description of Artificial Sequence: Synthetic peptide
  N-term Acetic Acid
  MOD_RES (1)..(1): (R)-2-allylpyrrolidine-2-carboxylic acid
  MOD_RES (3)..(3): (S)-2-amino-4,4-dimethylpentanoic acid
  MOD_RES (4)..(4): 2-amino-2-(pent-4-en-1-yl)hept-6-enoic acid
  MOD_RES (11)..(11): (S)-2-amino-2-methyldec-9-enoic acid
  MOD_RES (12)..(12): (S)-2-amino-3-(2-chlorophenyl)propanoic acid
  MOD_RES (13)..(13): (S)-2-amino-3-(benzo[b]thiophen-3-yl)propanoic acid
  MOD_RES (14)..(14): D-glutamine
  C-term amino
XDXXDDAAFLXFXQ

SEQ ID NO: 874 - protein, 14 aa, Artificial Sequence
  Description of Artificial Sequence: Synthetic peptide
  N-term Acetic Acid
  MOD_RES (1)..(1): (R)-2-allylpyrrolidine-2-carboxylic acid
  MOD_RES (3)..(3): (S)-2-amino-4,4-dimethylpentanoic acid
  MOD_RES (4)..(4): 2-amino-2-(pent-4-en-1-yl)hept-6-enoic acid
  MOD_RES (11)..(11): (S)-2-amino-2-methyldec-9-enoic acid
  MOD_RES (12)..(12): (S)-2-amino-3-(thiophen-3-yl)propanoic acid
  MOD_RES (13)..(13): (S)-2-amino-3-(benzo[b]thiophen-3-yl)propanoic acid
  MOD_RES (14)..(14): D-glutamine
  C-term amino
XDXXDDAAFLXXXQ

SEQ ID NO: 875 - protein, 14 aa, Artificial Sequence
  Description of Artificial Sequence: Synthetic peptide
  N-term Acetic Acid
  MOD_RES (1)..(1): (R)-2-allylpyrrolidine-2-carboxylic acid
  MOD_RES (3)..(3): (S)-2-amino-4,4-dimethylpentanoic acid
  MOD_RES (4)..(4): 2-amino-2-(pent-4-en-1-yl)hept-6-enoic acid
  MOD_RES (9)..(9): (S)-2-amino-3-(2-cyanophenyl)propanoic acid
  MOD_RES (11)..(11): (S)-3-amino-1-((pent-4-en-1-yloxy)carbonyl)pyrrolidine-3- carboxylic acid
  MOD_RES (12)..(12): (S)-2-amino-3-(thiophen-3-yl)propanoic acid
  MOD_RES (13)..(13): (S)-2-amino-3-(benzo[b]thiophen-3-yl)propanoic acid
  C-term amino
XDXXDDAAFLXXXQ

SEQ ID NO: 876 - protein, 14 aa, Artificial Sequence
  Description of Artificial Sequence: Synthetic peptide
  N-term Acetic Acid
  MOD_RES (1)..(1): (R)-2-allylpyrrolidine-2-carboxylic acid
  MOD_RES (3)..(3): (S)-2-amino-4,4-dimethylpentanoic acid
  MOD_RES (4)..(4): 2-amino-2-(pent-4-en-1-yl)hept-6-enoic acid
  MOD_RES (9)..(9): (S)-2-amino-3-(3-cyanophenyl)propanoic acid
  MOD_RES (11)..(11): (S)-3-amino-1-((pent-4-en-1-yloxy)carbonyl)pyrrolidine-3- carboxylic acid
  MOD_RES (12)..(12): (S)-2-amino-3-(thiophen-3-yl)propanoic acid
  MOD_RES (13)..(13): (S)-2-amino-3-(benzo[b]thiophen-3-yl)propanoic acid
  C-term amino
XDXXDDAAFLXXXQ

SEQ ID NO: 877 - protein, 14 aa, Artificial Sequence
  Description of Artificial Sequence: Synthetic peptide
  N-term Acetic Acid
  MOD_RES (1)..(1): (R)-2-allylpyrrolidine-2-carboxylic acid
  MOD_RES (3)..(3): (S)-2-amino-4,4-dimethylpentanoic acid
  MOD_RES (4)..(4): 2-amino-2-(pent-4-en-1-yl)hept-6-enoic acid
  MOD_RES (9)..(9): (S)-2-amino-3-(4-cyanophenyl)propanoic acid
  MOD_RES (11)..(11): (S)-3-amino-1-((pent-4-en-1-yloxy)carbonyl)pyrrolidine-3- carboxylic acid
  MOD_RES (12)..(12): (S)-2-amino-3-(thiophen-3-yl)propanoic acid
  MOD_RES (13)..(13): (S)-2-amino-3-(benzo[b]thiophen-3-yl)propanoic acid
  C-term amino
XDXXDDAAFLXXXQ

SEQ ID NO: 878 - protein, 14 aa, Artificial Sequence
  Description of Artificial Sequence: Synthetic peptide
  N-term Acetic Acid
  MOD_RES (1)..(1): (R)-2-allylpyrrolidine-2-carboxylic acid
  MOD_RES (3)..(3): (S)-2-amino-4,4-dimethylpentanoic acid
  MOD_RES (4)..(4): 2-amino-2-(pent-4-en-1-yl)hept-6-enoic acid
  MOD_RES (11)..(11): (S)-3-amino-1-((pent-4-en-1-yloxy)carbonyl)pyrrolidine-3- carboxylic acid
  MOD_RES (12)..(12): (S)-2-amino-3-(2-cyanophenyl)propanoic acid
  MOD_RES (13)..(13): (S)-2-amino-3-(benzo[b]thiophen-3-yl)propanoic acid
  C-term amino
XDXXDDAAFLXFXQ

SEQ ID NO: 879 - protein, 14 aa, Artificial Sequence
  Description of Artificial Sequence: Synthetic peptide
  N-term Acetic Acid
  MOD_RES (1)..(1): (R)-2-allylpyrrolidine-2-carboxylic acid
  MOD_RES (3)..(3): (S)-2-amino-4,4-dimethylpentanoic acid
  MOD_RES (4)..(4): 2-amino-2-(pent-4-en-1-yl)hept-6-enoic acid
  MOD_RES (11)..(11): (S)-3-amino-1-((pent-4-en-1-yloxy)carbonyl)pyrrolidine-3- carboxylic acid
  MOD_RES (12)..(12): (S)-2-amino-3-(3-cyanophenyl)propanoic acid
  MOD_RES (13)..(13): (S)-2-amino-3-(benzo[b]thiophen-3-yl)propanoic acid
  C-term amino
XDXXDDAAFLXFXQ

SEQ ID NO: 880 - protein, 14 aa, Artificial Sequence
  Description of Artificial Sequence: Synthetic peptide
  N-term Acetic Acid
  MOD_RES (1)..(1): (R)-2-allylpyrrolidine-2-carboxylic acid
  MOD_RES (3)..(3): (S)-2-amino-4,4-dimethylpentanoic acid
  MOD_RES (4)..(4): 2-amino-2-(pent-4-en-1-yl)hept-6-enoic acid
  MOD_RES (11)..(11): (S)-3-amino-1-((pent-4-en-1-yloxy)carbonyl)pyrrolidine-3- carboxylic acid
  MOD_RES (12)..(12): (S)-2-amino-3-(4-cyanophenyl)propanoic acid
  MOD_RES (13)..(13): (S)-2-amino-3-(benzo[b]thiophen-3-yl)propanoic acid
  C-term amino
XDXXDDAAFLXFXQ

SEQ ID NO: 881 - protein, 14 aa, Artificial Sequence
  Description of Artificial Sequence: Synthetic peptide
  N-term Acetic Acid
  MOD_RES (1)..(1): (R)-2-allylpyrrolidine-2-carboxylic acid
  MOD_RES (3)..(3): (S)-2-amino-4,4-dimethylpentanoic acid
  MOD_RES (4)..(4): 2-amino-2-(pent-4-en-1-yl)hept-6-enoic acid
  MOD_RES (11)..(11): (S)-3-amino-1-((pent-4-en-1-yloxy)carbonyl)pyrrolidine-3- carboxylic acid
  MOD_RES (12)..(12): (S)-2-amino-3-(thiophen-3-yl)propanoic acid
  MOD_RES (13)..(13): (S)-2-amino-3-(benzo[b]thiophen-3-yl)propanoic acid
  C-term amino
XDXXNDAAFNXXXQ

SEQ ID NO: 882 - protein, 14 aa, Artificial Sequence
  Description of Artificial Sequence: Synthetic peptide
  N-term Acetic Acid
  MOD_RES (1)..(1): (R)-2-allylpyrrolidine-2-carboxylic acid
  MOD_RES (3)..(3): (S)-2-amino-4,4-dimethylpentanoic acid
  MOD_RES (4)..(4): 2-amino-2-(pent-4-en-1-yl)hept-6-enoic acid
  MOD_RES (11)..(11): (S)-3-amino-1-((pent-4-en-1-yloxy)carbonyl)pyrrolidine-3- carboxylic acid
  MOD_RES (12)..(12): (S)-2-amino-3-(thiophen-3-yl)propanoic acid
  MOD_RES (13)..(13): (S)-2-amino-3-(benzo[b]thiophen-3-yl)propanoic acid
  C-term amino
XDXXNDAAFLXXXQ

SEQ ID NO: 883 - protein, 14 aa, Artificial Sequence
  Description of Artificial Sequence: Synthetic peptide
  N-term Acetic Acid
  MOD_RES (1)..(1): (R)-2-allylpyrrolidine-2-carboxylic acid
  MOD_RES (3)..(3): (S)-2-amino-4,4-dimethylpentanoic acid
  MOD_RES (4)..(4): 2-amino-2-(pent-4-en-1-yl)hept-6-enoic acid
  MOD_RES (11)..(11): (S)-3-amino-1-((pent-4-en-1-yloxy)carbonyl)pyrrolidine-3- carboxylic acid
  MOD_RES (12)..(12): (S)-2-amino-3-(thiophen-3-yl)propanoic acid
  MOD_RES (13)..(13): (S)-2-amino-3-(benzo[b]thiophen-3-yl)propanoic acid
  C-term amino
XDXXSDAAFNXXXQ

SEQ ID NO: 884 - protein, 14 aa, Artificial Sequence
  Description of Artificial Sequence: Synthetic peptide
  N-term Acetic Acid
  MOD_RES (1)..(1): (R)-2-allylpyrrolidine-2-carboxylic acid
  MOD_RES (3)..(3): (S)-2-amino-4,4-dimethylpentanoic acid
  MOD_RES (4)..(4): 2-amino-2-(pent-4-en-1-yl)hept-6-enoic acid
  MOD_RES (11)..(11): (S)-3-amino-1-((pent-4-en-1-yloxy)carbonyl)pyrrolidine-3- carboxylic acid
  MOD_RES (12)..(12): (S)-2-amino-3-(thiophen-3-yl)propanoic acid
  MOD_RES (13)..(13): (S)-2-amino-3-(benzo[b]thiophen-3-yl)propanoic acid
  C-term amino
XDXXSDAAFLXXXQ

SEQ ID NO: 885 - protein, 14 aa, Artificial Sequence
  Description of Artificial Sequence: Synthetic peptide
  N-term Acetic Acid
  MOD_RES (1)..(1): (R)-2-allylpyrrolidine-2-carboxylic acid
  MOD_RES (3)..(3): (S)-2-amino-4,4-dimethylpentanoic acid
  MOD_RES (4)..(4): 2-amino-2-(pent-4-en-1-yl)hept-6-enoic acid
  MOD_RES (11)..(11): (S)-3-amino-1-((pent-4-en-1-yloxy)carbonyl)pyrrolidine-3- carboxylic acid
  MOD_RES (12)..(12): (S)-2-amino-3-(thiophen-3-yl)propanoic acid
  MOD_RES (13)..(13): (S)-2-amino-3-(benzo[b]thiophen-3-yl)propanoic acid
  C-term amino
XDXXQDAAFNXXXQ

SEQ ID NO: 886 - protein, 14 aa, Artificial Sequence
  Description of Artificial Sequence: Synthetic peptide
  N-term Acetic Acid
  MOD_RES (1)..(1): (R)-2-allylpyrrolidine-2-carboxylic acid
  MOD_RES (3)..(3): (S)-2-amino-4,4-dimethylpentanoic acid
  MOD_RES (4)..(4): 2-amino-2-(pent-4-en-1-yl)hept-6-enoic acid
  MOD_RES (11)..(11): (S)-3-amino-1-((pent-4-en-1-yloxy)carbonyl)pyrrolidine-3- carboxylic acid
  MOD_RES (12)..(12): (S)-2-amino-3-(thiophen-3-yl)propanoic acid
  MOD_RES (13)..(13): (S)-2-amino-3-(benzo[b]thiophen-3-yl)propanoic acid
  C-term amino
XDXXQDAAFLXXXQ

SEQ ID NO: 887 - protein, 14 aa, Artificial Sequence
  Description of Artificial Sequence: Synthetic peptide
  N-term Acetic Acid
  MOD_RES (1)..(1): (R)-2-allylpyrrolidine-2-carboxylic acid
  MOD_RES (3)..(3): (S)-2-amino-4,4-dimethylpentanoic acid
  MOD_RES (4)..(4): 2-amino-2-(pent-4-en-1-yl)hept-6-enoic acid
  MOD_RES (11)..(11): (S)-3-amino-1-((pent-4-en-1-yloxy)carbonyl)pyrrolidine-3- carboxylic acid
  MOD_RES (12)..(12): (S)-2-amino-3-(thiophen-3-yl)propanoic acid
  MOD_RES (13)..(13): (S)-2-amino-3-(benzo[b]thiophen-3-yl)propanoic acid
  C-term amino
XDXXLDAAFNXXXQ

SEQ ID NO: 888 - protein, 14 aa, Artificial Sequence
  Description of Artificial Sequence: Synthetic peptide
  N-term Acetic Acid
  MOD_RES (1)..(1): (R)-2-allylpyrrolidine-2-carboxylic acid
  MOD_RES (3)..(3): (S)-2-amino-4,4-dimethylpentanoic acid
  MOD_RES (4)..(4): 2-amino-2-(pent-4-en-1-yl)hept-6-enoic acid
  MOD_RES (11)..(11): (S)-3-amino-1-((pent-4-en-1-yloxy)carbonyl)pyrrolidine-3- carboxylic acid
  MOD_RES (12)..(12): (S)-2-amino-3-(thiophen-3-yl)propanoic acid
  MOD_RES (13)..(13): (S)-2-amino-3-(benzo[b]thiophen-3-yl)propanoic acid
  C-term amino
XDXXLDAAFLXXXQ

SEQ ID NO: 889 - protein, 14 aa, Artificial Sequence
  Description of Artificial Sequence: Synthetic peptide
  N-term Acetic Acid
  MOD_RES (1)..(1): (R)-2-allylpyrrolidine-2-carboxylic acid
  MOD_RES (3)..(3): (S)-2-amino-4,4-dimethylpentanoic acid
  MOD_RES (4)..(4): 2-amino-2-(pent-4-en-1-yl)hept-6-enoic acid
  MOD_RES (5)..(5): L-homoserine
  MOD_RES (11)..(11): (S)-3-amino-1-((pent-4-en-1-yloxy)carbonyl)pyrrolidine-3- carboxylic acid
  MOD_RES (12)..(12): (S)-2-amino-3-(thiophen-3-yl)propanoic acid
  MOD_RES (13)..(13): (S)-2-amino-3-(benzo[b]thiophen-3-yl)propanoic acid
  C-term amino
XDXXSDAAFNXXXQ

SEQ ID NO: 890 - protein, 14 aa, Artificial Sequence
  Description of Artificial Sequence: Synthetic peptide
  N-term Acetic Acid
  MOD_RES (1)..(1): (R)-2-allylpyrrolidine-2-carboxylic acid
  MOD_RES (3)..(3): (S)-2-amino-4,4-dimethylpentanoic acid
  MOD_RES (4)..(4): 2-amino-2-(pent-4-en-1-yl)hept-6-enoic acid
  MOD_RES (5)..(5): L-homoserine
  MOD_RES (11)..(11): (S)-3-amino-1-((pent-4-en-1-yloxy)carbonyl)pyrrolidine-3- carboxylic acid
  MOD_RES (12)..(12): (S)-2-amino-3-(thiophen-3-yl)propanoic acid
  MOD_RES (13)..(13): (S)-2-amino-3-(benzo[b]thiophen-3-yl)propanoic acid
  C-term amino
XDXXSDAAFLXXXQ

SEQ ID NO: 891 - protein, 14 aa, Artificial Sequence
  Description of Artificial Sequence: Synthetic peptide
  N-term Acetic Acid
  MOD_RES (1)..(1): (R)-2-allylpyrrolidine-2-carboxylic acid
  MOD_RES (3)..(3): (S)-2-amino-4,4-dimethylpentanoic acid
  MOD_RES (4)..(4): 2-amino-2-(pent-4-en-1-yl)hept-6-enoic acid
  MOD_RES (5)..(5): (S)-2,4-diaminobutanoic acid
  MOD_RES (11)..(11): (S)-3-amino-1-((pent-4-en-1-yloxy)carbonyl)pyrrolidine-3- carboxylic acid
  MOD_RES (12)..(12): (S)-2-amino-3-(thiophen-3-yl)propanoic acid
  MOD_RES (13)..(13): (S)-2-amino-3-(benzo[b]thiophen-3-yl)propanoic acid
  C-term amino
XDXXXDAAFNXXXQ

SEQ ID NO: 892 - protein, 14 aa, Artificial Sequence
  Description of Artificial Sequence: Synthetic peptide
  N-term Acetic Acid
  MOD_RES (1)..(1): (R)-2-allylpyrrolidine-2-carboxylic acid
  MOD_RES (3)..(3): (S)-2-amino-4,4-dimethylpentanoic acid
  MOD_RES (4)..(4): 2-amino-2-(pent-4-en-1-yl)hept-6-enoic acid
  MOD_RES (5)..(5): (S)-2,4-diaminobutanoic acid
  MOD_RES (11)..(11): (S)-3-amino-1-((pent-4-en-1-yloxy)carbonyl)pyrrolidine-3- carboxylic acid
  MOD_RES (12)..(12): (S)-2-amino-3-(thiophen-3-yl)propanoic acid
  MOD_RES (13)..(13): (S)-2-amino-3-(benzo[b]thiophen-3-yl)propanoic acid
  C-term amino
XDXXXDAAFLXXXQ

SEQ ID NO: 893 - protein, 14 aa, Artificial Sequence
  Description of Artificial Sequence: Synthetic peptide
  N-term methanesulfonic acid
  MOD_RES (1)..(1): (R)-2-allylpyrrolidine-2-carboxylic acid
  MOD_RES (3)..(3): (S)-2-amino-4,4-dimethylpentanoic acid
  MOD_RES (4)..(4): 2-amino-2-(pent-4-en-1-yl)hept-6-enoic acid
  MOD_RES (11)..(11): (S)-3-amino-1-((pent-4-en-1-yloxy)carbonyl)pyrrolidine-3- carboxylic acid
  MOD_RES (12)..(12): (S)-2-amino-3-(thiophen-3-yl)propanoic acid
  MOD_RES (13)..(13): (S)-2-amino-3-(benzo[b]thiophen-3-yl)propanoic acid
  C-term amino
XDXXDDAAFNXXXQ

SEQ ID NO: 894 - protein, 14 aa, Artificial Sequence
  Description of Artificial Sequence: Synthetic peptide
  N-term methanesulfonic acid
  MOD_RES (1)..(1): (R)-2-allylpyrrolidine-2-carboxylic acid
  MOD_RES (3)..(3): (S)-2-amino-4,4-dimethylpentanoic acid
  MOD_RES (4)..(4): 2-amino-2-(pent-4-en-1-yl)hept-6-enoic acid
  MOD_RES (6)..(6): (S)-2-amino-3-((carboxymethyl)(2,2,2-trifluoroethyl)amino) propanoic acid
  MOD_RES (11)..(11): (S)-3-amino-1-((pent-4-en-1-yloxy)carbonyl)pyrrolidine-3- carboxylic acid
  MOD_RES (12)..(12): (S)-2-amino-3-(thiophen-3-yl)propanoic acid
  MOD_RES (13)..(13): (S)-2-amino-3-(benzo[b]thiophen-3-yl)propanoic acid
  C-term amino
XDXXDXAAFNXXXQ

SEQ ID NO: 895 - protein, 14 aa, Artificial Sequence
  Description of Artificial Sequence: Synthetic peptide
  N-term Acetic Acid
  MOD_RES (1)..(1): (R)-2-allylpyrrolidine-2-carboxylic acid
  MOD_RES (3)..(3): (S)-2-amino-4,4-dimethylpentanoic acid
  MOD_RES (4)..(4): 2-amino-2-(pent-4-en-1-yl)hept-6-enoic acid
  MOD_RES (11)..(11): (S)-3-amino-1-((pent-4-en-1-yloxy)carbonyl)pyrrolidine-3- carboxylic acid
  MOD_RES (12)..(12): (S)-2-amino-3-(thiophen-3-yl)propanoic acid
  MOD_RES (13)..(13): (S)-2-amino-3-(benzo[b]thiophen-3-yl)propanoic acid
  C-term amino
XNXXDDAAFNXXXQ

SEQ ID NO: 896 - protein, 14 aa, Artificial Sequence
  Description of Artificial Sequence: Synthetic peptide
  N-term Acetic Acid
  MOD_RES (1)..(1): (R)-2-allylpyrrolidine-2-carboxylic acid
  MOD_RES (3)..(3): (S)-2-amino-4,4-dimethylpentanoic acid
  MOD_RES (4)..(4): 2-amino-2-(pent-4-en-1-yl)hept-6-enoic acid
  MOD_RES (11)..(11): (S)-3-amino-1-((pent-4-en-1-yloxy)carbonyl)pyrrolidine-3- carboxylic acid
  MOD_RES (12)..(12): (S)-2-amino-3-(thiophen-3-yl)propanoic acid
  MOD_RES (13)..(13): (S)-2-amino-3-(benzo[b]thiophen-3-yl)propanoic acid
  C-term amino
XNXXDDAAFLXXXQ

SEQ ID NO: 897 - protein, 14 aa, Artificial Sequence
  Description of Artificial Sequence: Synthetic peptide
  N-term Acetic Acid
  MOD_RES (1)..(1): (R)-2-allylpyrrolidine-2-carboxylic acid
  MOD_RES (3)..(3): (S)-2-amino-4,4-dimethylpentanoic acid
  MOD_RES (4)..(4): 2-amino-2-(pent-4-en-1-yl)hept-6-enoic acid
  MOD_RES (11)..(11): (S)-3-amino-1-((pent-4-en-1-yloxy)carbonyl)pyrrolidine-3- carboxylic acid
  MOD_RES (12)..(12): (S)-2-amino-3-(thiophen-3-yl)propanoic acid
  MOD_RES (13)..(13): (S)-2-amino-3-(benzo[b]thiophen-3-yl)propanoic acid
  C-term amino
XSXXDDAAFNXXXQ

SEQ ID NO: 898 - protein, 14 aa, Artificial Sequence
  Description of Artificial Sequence: Synthetic peptide
  N-term Acetic Acid
  MOD_RES (1)..(1): (R)-2-allylpyrrolidine-2-carboxylic acid
  MOD_RES (3)..(3): (S)-2-amino-4,4-dimethylpentanoic acid
  MOD_RES (4)..(4): 2-amino-2-(pent-4-en-1-yl)hept-6-enoic acid
  MOD_RES (11)..(11): (S)-3-amino-1-((pent-4-en-1-yloxy)carbonyl)pyrrolidine-3- carboxylic acid
  MOD_RES (12)..(12): (S)-2-amino-3-(thiophen-3-yl)propanoic acid
  MOD_RES (13)..(13): (S)-2-amino-3-(benzo[b]thiophen-3-yl)propanoic acid
  C-term amino
XSXXDDAAFLXXXQ

SEQ ID NO: 899 - protein, 14 aa, Artificial Sequence
  Description of Artificial Sequence: Synthetic peptide
  N-term Acetic Acid
  MOD_RES (1)..(1): (R)-2-allylpyrrolidine-2-carboxylic acid
  MOD_RES (3)..(3): (S)-2-amino-4,4-dimethylpentanoic acid
  MOD_RES (4)..(4): 2-amino-2-(pent-4-en-1-yl)hept-6-enoic acid
  MOD_RES (11)..(11): (S)-3-amino-1-((pent-4-en-1-yloxy)carbonyl)pyrrolidine-3- carboxylic acid
  MOD_RES (12)..(12): (S)-2-amino-3-(thiophen-3-yl)propanoic acid
  MOD_RES (13)..(13): (S)-2-amino-3-(benzo[b]thiophen-3-yl)propanoic acid
  C-term amino
XQXXDDAAFNXXXQ

SEQ ID NO: 900 - protein, 14 aa, Artificial Sequence
  Description of Artificial Sequence: Synthetic peptide
  N-term Acetic Acid
  MOD_RES (1)..(1): (R)-2-allylpyrrolidine-2-carboxylic acid
  MOD_RES (3)..(3): (S)-2-amino-4,4-dimethylpentanoic acid
  MOD_RES (4)..(4): 2-amino-2-(pent-4-en-1-yl)hept-6-enoic acid
  MOD_RES (11)..(11): (S)-3-amino-1-((pent-4-en-1-yloxy)carbonyl)pyrrolidine-3- carboxylic acid
  MOD_RES (12)..(12): (S)-2-amino-3-(thiophen-3-yl)propanoic acid
  MOD_RES (13)..(13): (S)-2-amino-3-(benzo[b]thiophen-3-yl)propanoic acid
  C-term amino
XQXXDDAAFLXXXQ

SEQ ID NO: 901 - protein, 14 aa, Artificial Sequence
  Description of Artificial Sequence: Synthetic peptide
  N-term Acetic Acid
  MOD_RES (1)..(1): (R)-2-allylpyrrolidine-2-carboxylic acid
  MOD_RES (3)..(3): (S)-2-amino-4,4-dimethylpentanoic acid
  MOD_RES (4)..(4): 2-amino-2-(pent-4-en-1-yl)hept-6-enoic acid
  MOD_RES (11)..(11): (S)-3-amino-1-((pent-4-en-1-yloxy)carbonyl)pyrrolidine-3- carboxylic acid
  MOD_RES (12)..(12): (S)-2-amino-3-(thiophen-3-yl)propanoic acid
  MOD_RES (13)..(13): (S)-2-amino-3-(benzo[b]thiophen-3-yl)propanoic acid
  C-term amino
XLXXDDAAFNXXXQ

SEQ ID NO: 902 - protein, 14 aa, Artificial Sequence
  Description of Artificial Sequence: Synthetic peptide
  N-term Acetic Acid
  MOD_RES (1)..(1): (R)-2-allylpyrrolidine-2-carboxylic acid
  MOD_RES (3)..(3): (S)-2-amino-4,4-dimethylpentanoic acid
  MOD_RES (4)..(4): 2-amino-2-(pent-4-en-1-yl)hept-6-enoic acid
  MOD_RES (11)..(11): (S)-3-amino-1-((pent-4-en-1-yloxy)carbonyl)pyrrolidine-3- carboxylic acid
  MOD_RES (12)..(12): (S)-2-amino-3-(thiophen-3-yl)propanoic acid
  MOD_RES (13)..(13): (S)-2-amino-3-(benzo[b]thiophen-3-yl)propanoic acid
  C-term amino
XLXXDDAAFLXXXQ

SEQ ID NO: 903 - protein, 14 aa, Artificial Sequence
  Description of Artificial Sequence: Synthetic peptide
  N-term Acetic Acid
  MOD_RES (1)..(1): (R)-2-allylpyrrolidine-2-carboxylic acid
  MOD_RES (2)..(2): L-homoserine
  MOD_RES (3)..(3): (S)-2-amino-4,4-dimethylpentanoic acid
  MOD_RES (4)..(4): 2-amino-2-(pent-4-en-1-yl)hept-6-enoic acid
  MOD_RES (11)..(11): (S)-3-amino-1-((pent-4-en-1-yloxy)carbonyl)pyrrolidine-3- carboxylic acid
  MOD_RES (12)..(12): (S)-2-amino-3-(thiophen-3-yl)propanoic acid
  MOD_RES (13)..(13): (S)-2-amino-3-(benzo[b]thiophen-3-yl)propanoic acid
  C-term amino
XSXXDDAAFNXXXQ

SEQ ID NO: 904 - protein, 14 aa, Artificial Sequence
  Description of Artificial Sequence: Synthetic peptide
  N-term Acetic Acid
  MOD_RES (1)..(1): (R)-2-allylpyrrolidine-2-carboxylic acid
  MOD_RES (2)..(2): L-homoserine
  MOD_RES (3)..(3): (S)-2-amino-4,4-dimethylpentanoic acid
  MOD_RES (4)..(4): 2-amino-2-(pent-4-en-1-yl)hept-6-enoic acid
  MOD_RES (11)..(11): (S)-3-amino-1-((pent-4-en-1-yloxy)carbonyl)pyrrolidine-3- carboxylic acid
  MOD_RES (12)..(12): (S)-2-amino-3-(thiophen-3-yl)propanoic acid
  MOD_RES (13)..(13): (S)-2-amino-3-(benzo[b]thiophen-3-yl)propanoic acid
  C-term amino
XSXXDDAAFLXXXQ

SEQ ID NO: 905 - protein, 14 aa, Artificial Sequence
  Description of Artificial Sequence: Synthetic peptide
  N-term Acetic Acid
  MOD_RES (1)..(1): (R)-2-allylpyrrolidine-2-carboxylic acid
  MOD_RES (2)..(2): (S)-2,4-diaminobutanoic acid
  MOD_RES (3)..(3): (S)-2-amino-4,4-dimethylpentanoic acid
  MOD_RES (4)..(4): 2-amino-2-(pent-4-en-1-yl)hept-6-enoic acid
  MOD_RES (11)..(11): (S)-3-amino-1-((pent-4-en-1-yloxy)carbonyl)pyrrolidine-3- carboxylic acid
  MOD_RES (12)..(12): (S)-2-amino-3-(thiophen-3-yl)propanoic acid
  MOD_RES (13)..(13): (S)-2-amino-3-(benzo[b]thiophen-3-yl)propanoic acid
  C-term amino
XXXXDDAAFNXXXQ

SEQ ID NO: 906 - protein, 14 aa, Artificial Sequence
  Description of Artificial Sequence: Synthetic peptide
  N-term Acetic Acid
  MOD_RES (1)..(1): (R)-2-allylpyrrolidine-2-carboxylic acid
  MOD_RES (2)..(2): (S)-2,4-diaminobutanoic acid
  MOD_RES (3)..(3): (S)-2-amino-4,4-dimethylpentanoic acid
  MOD_RES (4)..(4): 2-amino-2-(pent-4-en-1-yl)hept-6-enoic acid
  MOD_RES (11)..(11): (S)-3-amino-1-((pent-4-en-1-yloxy)carbonyl)pyrrolidine-3- carboxylic acid
  MOD_RES (12)..(12): (S)-2-amino-3-(thiophen-3-yl)propanoic acid
  MOD_RES (13)..(13): (S)-2-amino-3-(benzo[b]thiophen-3-yl)propanoic acid
  C-term amino
XXXXDDAAFLXXXQ

SEQ ID NO: 907 - protein, 14 aa, Artificial Sequence
  Description of Artificial Sequence: Synthetic peptide
  N-term Acetic Acid
  MOD_RES (1)..(1): (R)-2-allylpyrrolidine-2-carboxylic acid
  MOD_RES (3)..(3): (S)-2-amino-4,4-dimethylpentanoic acid
  MOD_RES (4)..(4): 2-amino-2-(pent-4-en-1-yl)hept-6-enoic acid
  MOD_RES (11)..(11): (S)-3-amino-1-((pent-4-en-1-yloxy)carbonyl)pyrrolidine-3- carboxylic acid
  MOD_RES (12)..(12): (S)-2-amino-3-(thiophen-3-yl)propanoic acid
  MOD_RES (13)..(13): (S)-2-amino-3-(naphthalen-1-yl)propanoic acid
  C-term amino
XDXXDDAAFTXXXQ

SEQ ID NO: 908 - protein, 14 aa, Artificial Sequence
  Description of Artificial Sequence: Synthetic peptide
  N-term Acetic Acid
  MOD_RES (1)..(1): (R)-2-allylpyrrolidine-2-carboxylic acid
  MOD_RES (3)..(3): (S)-2-amino-4,4-dimethylpentanoic acid
  MOD_RES (4)..(4): 2-amino-2-(pent-4-en-1-yl)hept-6-enoic acid
  MOD_RES (11)..(11): (S)-3-amino-1-((pent-4-en-1-yloxy)carbonyl)pyrrolidine-3- carboxylic acid
  MOD_RES (12)..(12): (S)-2-amino-3-(thiophen-3-yl)propanoic acid
  MOD_RES (13)..(13): (S)-2-amino-3-(naphthalen-2-yl)propanoic acid
  C-term amino
XDXXDDAAFTXXXQ

SEQ ID NO: 909 - protein, 14 aa, Artificial Sequence
  Description of Artificial Sequence: Synthetic peptide
  N-term Acetic Acid
  MOD_RES (1)..(1): (R)-2-allylpyrrolidine-2-carboxylic acid
  MOD_RES (3)..(3): (S)-2-amino-4,4-dimethylpentanoic acid
  MOD_RES (4)..(4): 2-amino-2-(pent-4-en-1-yl)hept-6-enoic acid
  MOD_RES (11)..(11): (S)-3-amino-1-((pent-4-en-1-yloxy)carbonyl)pyrrolidine-3- carboxylic acid
  MOD_RES (12)..(12): (S)-2-amino-3-(thiophen-3-yl)propanoic acid
  MOD_RES (13)..(13): (S)-2-amino-3-(naphthalen-1-yl)propanoic acid
  C-term amino
XDXXDDAAFLXXXQ

SEQ ID NO: 910 - protein, 14 aa, Artificial Sequence
  Description of Artificial Sequence: Synthetic peptide
  N-term Acetic Acid
  MOD_RES (1)..(1): (R)-2-allylpyrrolidine-2-carboxylic acid
  MOD_RES (3)..(3): (S)-2-amino-4,4-dimethylpentanoic acid
  MOD_RES (4)..(4): 2-amino-2-(pent-4-en-1-yl)hept-6-enoic acid
  MOD_RES (11)..(11): (S)-3-amino-1-((pent-4-en-1-yloxy)carbonyl)pyrrolidine-3- carboxylic acid
  MOD_RES (12)..(12): (S)-2-amino-3-(thiophen-3-yl)propanoic acid
  MOD_RES (13)..(13): (S)-2-amino-3-(naphthalen-2-yl)propanoic acid
  C-term amino
XDXXDDAAFLXXXQ

SEQ ID NO: 911 - protein, 14 aa, Artificial Sequence
  Description of Artificial Sequence: Synthetic peptide
  N-term Acetic Acid
  MOD_RES (1)..(1): (R)-2-allylpyrrolidine-2-carboxylic acid
  MOD_RES (3)..(3): (S)-2-amino-4,4-dimethylpentanoic acid
  MOD_RES (4)..(4): 2-amino-2-(pent-4-en-1-yl)hept-6-enoic acid
  MOD_RES (11)..(11): (S)-3-amino-1-((pent-4-en-1-yloxy)carbonyl)pyrrolidine-3- carboxylic acid
  MOD_RES (12)..(12): (S)-2-amino-3-(2-chlorophenyl)propanoic acid
  MOD_RES (13)..(13): (S)-2-amino-3-(naphthalen-1-yl)propanoic acid
  C-term amino
XDXXDDAAFLXFXQ

SEQ ID NO: 912 - protein, 14 aa, Artificial Sequence
  Description of Artificial Sequence: Synthetic peptide
  N-term Acetic Acid
  MOD_RES (1)..(1): (R)-2-allylpyrrolidine-2-carboxylic acid
  MOD_RES (3)..(3): (S)-2-amino-4,4-dimethylpentanoic acid
  MOD_RES (4)..(4): 2-amino-2-(pent-4-en-1-yl)hept-6-enoic acid
  MOD_RES (11)..(11): (S)-3-amino-1-((pent-4-en-1-yloxy)carbonyl)pyrrolidine-3- carboxylic acid
  MOD_RES (12)..(12): (S)-2-amino-3-(2-chlorophenyl)propanoic acid
  MOD_RES (13)..(13): (S)-2-amino-3-(naphthalen-2-yl)propanoic acid
  C-term amino
XDXXDDAAFLXFXQ

SEQ ID NO: 913 - protein, 14 aa, Artificial Sequence
  Description of Artificial Sequence: Synthetic peptide
  N-term Acetic Acid
  MOD_RES (1)..(1): (R)-2-allylpyrrolidine-2-carboxylic acid
  MOD_RES (3)..(3): (S)-2-amino-4,4-dimethylpentanoic acid
  MOD_RES (4)..(4): 2-amino-2-(pent-4-en-1-yl)hept-6-enoic acid
  MOD_RES (11)..(11): (S)-3-amino-1-((pent-4-en-1-yloxy)carbonyl)pyrrolidine-3- carboxylic acid
  MOD_RES (12)..(12): (S)-2-amino-3-(thiophen-3-yl)propanoic acid
  MOD_RES (13)..(13): (S)-2-amino-3-(naphthalen-1-yl)propanoic acid
  C-term amino
XDXXDDAAFLXXXS

SEQ ID NO: 914 - protein, 14 aa, Artificial Sequence
  Description of Artificial Sequence: Synthetic peptide
  N-term Acetic Acid
  MOD_RES (1)..(1): (R)-2-allylpyrrolidine-2-carboxylic acid
  MOD_RES (3)..(3): (S)-2-amino-4,4-dimethylpentanoic acid
  MOD_RES (4)..(4): 2-amino-2-(pent-4-en-1-yl)hept-6-enoic acid
  MOD_RES (11)..(11): (S)-3-amino-1-((pent-4-en-1-yloxy)carbonyl)pyrrolidine-3- carboxylic acid
  MOD_RES (12)..(12): (S)-2-amino-3-(thiophen-3-yl)propanoic acid
  MOD_RES (13)..(13): (S)-2-amino-3-(naphthalen-2-yl)propanoic acid
  C-term amino
XDXXDDAAFLXXXS

SEQ ID NO: 915 - protein, 14 aa, Artificial Sequence
  Description of Artificial Sequence: Synthetic peptide
  N-term Acetic Acid
  MOD_RES (1)..(1): (R)-2-allylpyrrolidine-2-carboxylic acid
  MOD_RES (3)..(3): (S)-2-amino-4,4-dimethylpentanoic acid
  MOD_RES (4)..(4): 2-amino-2-(pent-4-en-1-yl)hept-6-enoic acid
  MOD_RES (6)..(6): (S)-2-amino-3-((carboxymethyl)(2,2,2-trifluoroethyl)amino) propanoic acid
  MOD_RES (11)..(11): (S)-3-amino-1-((pent-4-en-1-yloxy)carbonyl)pyrrolidine-3- carboxylic acid
  MOD_RES (12)..(12): (S)-2-amino-3-(2-chlorophenyl)propanoic acid
  MOD_RES (13)..(13): (S)-2-amino-3-(benzo[b]thiophen-3-yl)propanoic acid
  C-term ethanamine
XDXXDXAAFTXFXQ

SEQ ID NO: 916 - protein, 13 aa, Artificial Sequence
  Description of Artificial Sequence: Synthetic peptide
  N-term Acetic Acid
  MOD_RES (1)..(1): (R)-2-allylpyrrolidine-2-carboxylic acid
  MOD_RES (3)..(3): (S)-2-amino-4,4-dimethylpentanoic acid
  MOD_RES (4)..(4): 2-amino-2-(pent-4-en-1-yl)hept-6-enoic acid
  MOD_RES (6)..(6): (S)-2-amino-3-((carboxymethyl)(2,2,2-trifluoroethyl)amino) propanoic acid
  MOD_RES (11)..(11): (S)-3-amino-1-((pent-4-en-1-yloxy)carbonyl)pyrrolidine-3- carboxylic acid
  MOD_RES (12)..(12): (S)-2-amino-3-(2-chlorophenyl)propanoic acid
  MOD_RES (13)..(13): (S)-2-amino-3-(benzo[b]thiophen-3-yl)propanoic acid
  C-term (2R,3R)-2-aminobutane-1,3-diol
XDXXDXAAFTXFX

SEQ ID NO: 917 - protein, 13 aa, Artificial Sequence
  Description of Artificial Sequence: Synthetic peptide
  N-term Acetic Acid
  MOD_RES (1)..(1): (R)-2-allylpyrrolidine-2-carboxylic acid
  MOD_RES (3)..(3): (S)-2-amino-4,4-dimethylpentanoic acid
  MOD_RES (4)..(4): 2-amino-2-(pent-4-en-1-yl)hept-6-enoic acid
  MOD_RES (6)..(6): (S)-2-amino-3-((carboxymethyl)(2,2,2-trifluoroethyl)amino) propanoic acid
  MOD_RES (11)..(11): (S)-3-amino-1-((pent-4-en-1-yloxy)carbonyl)pyrrolidine-3- carboxylic acid
  MOD_RES (12)..(12): (S)-2-amino-3-(2-chlorophenyl)propanoic acid
  MOD_RES (13)..(13): (S)-2-amino-3-(benzo[b]thiophen-3-yl)propanoic acid
  C-term (S)-2-aminopropan-1-ol
XDXXDXAAFTXFX

SEQ ID NO: 918 - protein, 13 aa, Artificial Sequence
  Description of Artificial Sequence: Synthetic peptide
  N-term Acetic Acid
  MOD_RES (1)..(1): (R)-2-allylpyrrolidine-2-carboxylic acid
  MOD_RES (3)..(3): (S)-2-amino-4,4-dimethylpentanoic acid
  MOD_RES (4)..(4): 2-amino-2-(pent-4-en-1-yl)hept-6-enoic acid
  MOD_RES (6)..(6): (S)-2-amino-3-((carboxymethyl)(2,2,2-trifluoroethyl)amino) propanoic acid
  MOD_RES (11)..(11): (S)-3-amino-1-((pent-4-en-1-yloxy)carbonyl)pyrrolidine-3- carboxylic acid
  MOD_RES (12)..(12): (S)-2-amino-3-(2-chlorophenyl)propanoic acid
  MOD_RES (13)..(13): (S)-2-amino-3-(benzo[b]thiophen-3-yl)propanoic acid
  C-term (S)-2-amino-4-methylpentan-1-ol
XDXXDXAAFTXFX

SEQ ID NO: 919 - protein, 14 aa, Artificial Sequence
  Description of Artificial Sequence: Synthetic peptide
  N-term Acetic Acid
  MOD_RES (1)..(1): (R)-2-allylpyrrolidine-2-carboxylic acid
  MOD_RES (3)..(3): (S)-2-amino-4,4-dimethylpentanoic acid
  MOD_RES (4)..(4): 2-amino-2-(pent-4-en-1-yl)hept-6-enoic acid
  MOD_RES (11)..(11): (S)-3-amino-1-((pent-4-en-1-yloxy)carbonyl)pyrrolidine-3- carboxylic acid
  MOD_RES (12)..(12): (S)-2-amino-3-(2-chlorophenyl)propanoic acid
  MOD_RES (13)..(13): (S)-2-amino-3-(benzo[b]thiophen-3-yl)propanoic acid
  C-term ethanamine
XDXXDDAAFTXFXS

SEQ ID NO: 920 - protein, 13 aa, Artificial Sequence
  Description of Artificial Sequence: Synthetic peptide
  N-term Acetic Acid
  MOD_RES (1)..(1): (R)-2-allylpyrrolidine-2-carboxylic acid
  MOD_RES (3)..(3): (S)-2-amino-4,4-dimethylpentanoic acid
  MOD_RES (4)..(4): 2-amino-2-(pent-4-en-1-yl)hept-6-enoic acid
  MOD_RES (11)..(11): (S)-3-amino-1-((pent-4-en-1-yloxy)carbonyl)pyrrolidine-3- carboxylic acid
  MOD_RES (12)..(12): (S)-2-amino-3-(2-chlorophenyl)propanoic acid
  MOD_RES (13)..(13): (S)-2-amino-3-(benzo[b]thiophen-3-yl)propanoic acid
  C-term (2R,3R)-2-aminobutane-1,3-diol
XDXXDDAAFTXFX

SEQ ID NO: 921 - protein, 13 aa, Artificial Sequence
  Description of Artificial Sequence: Synthetic peptide
  N-term Acetic Acid
  MOD_RES (1)..(1): (R)-2-allylpyrrolidine-2-carboxylic acid
  MOD_RES (3)..(3): (S)-2-amino-4,4-dimethylpentanoic acid
  MOD_RES (4)..(4): 2-amino-2-(pent-4-en-1-yl)hept-6-enoic acid
  MOD_RES (11)..(11): (S)-3-amino-1-((pent-4-en-1-yloxy)carbonyl)pyrrolidine-3- carboxylic acid
  MOD_RES (12)..(12): (S)-2-amino-3-(2-chlorophenyl)propanoic acid
  MOD_RES (13)..(13): (S)-2-amino-3-(benzo[b]thiophen-3-yl)propanoic acid
  C-term (S)-2-aminopropan-1-ol
XDXXDDAAFTXFX

SEQ ID NO: 922 - protein, 13 aa, Artificial Sequence
  Description of Artificial Sequence: Synthetic peptide
  N-term Acetic Acid
  MOD_RES (1)..(1): (R)-2-allylpyrrolidine-2-carboxylic acid
  MOD_RES (3)..(3): (S)-2-amino-4,4-dimethylpentanoic acid
  MOD_RES (4)..(4): 2-amino-2-(pent-4-en-1-yl)hept-6-enoic acid
  MOD_RES (11)..(11): (S)-3-amino-1-((pent-4-en-1-yloxy)carbonyl)pyrrolidine-3- carboxylic acid
  MOD_RES (12)..(12): (S)-2-amino-3-(2-chlorophenyl)propanoic acid
  MOD_RES (13)..(13): (S)-2-amino-3-(benzo[b]thiophen-3-yl)propanoic acid
  C-term (S)-2-amino-4-methylpentan-1-ol
XDXXDDAAFTXFX

SEQ ID NO: 923 - protein, 14 aa, Artificial Sequence
  Description of Artificial Sequence: Synthetic peptide
  N-term Acetic Acid
  MOD_RES (1)..(1): (R)-2-allylpyrrolidine-2-carboxylic acid
  MOD_RES (3)..(3): (S)-2-amino-4,4-dimethylpentanoic acid
  MOD_RES (4)..(4): 2-amino-2-(pent-4-en-1-yl)hept-6-enoic acid
  MOD_RES (11)..(11): (S)-3-amino-1-((pent-4-en-1-yloxy)carbonyl)pyrrolidine-3- carboxylic acid
  MOD_RES (12)..(12): (S)-2-amino-3-(2-chlorophenyl)propanoic acid
  MOD_RES (13)..(13): (S)-2-amino-3-(benzo[b]thiophen-3-yl)propanoic acid
  C-term ethanamine
XDXXDDAAFLXFXQ

SEQ ID NO: 924 - protein, 13 aa, Artificial Sequence
  Description of Artificial Sequence: Synthetic peptide
  N-term Acetic Acid
  MOD_RES (1)..(1): (R)-2-allylpyrrolidine-2-carboxylic acid
  MOD_RES (3)..(3): (S)-2-amino-4,4-dimethylpentanoic acid
  MOD_RES (4)..(4): 2-amino-2-(pent-4-en-1-yl)hept-6-enoic acid
  MOD_RES (11)..(11): (S)-3-amino-1-((pent-4-en-1-yloxy)carbonyl)pyrrolidine-3- carboxylic acid
  MOD_RES (12)..(12): (S)-2-amino-3-(2-chlorophenyl)propanoic acid
  MOD_RES (13)..(13): (S)-2-amino-3-(benzo[b]thiophen-3-yl)propanoic acid
  C-term (2R,3R)-2-aminobutane-1,3-diol
XDXXDDAAFLXFX

SEQ ID NO: 925 - protein, 13 aa, Artificial Sequence
  Description of Artificial Sequence: Synthetic peptide
  N-term Acetic Acid
  MOD_RES (1)..(1): (R)-2-allylpyrrolidine-2-carboxylic acid
  MOD_RES (3)..(3): (S)-2-amino-4,4-dimethylpentanoic acid
  MOD_RES (4)..(4): 2-amino-2-(pent-4-en-1-yl)hept-6-enoic acid
  MOD_RES (11)..(11): (S)-3-amino-1-((pent-4-en-1-yloxy)carbonyl)pyrrolidine-3- carboxylic acid
  MOD_RES (12)..(12): (S)-2-amino-3-(2-chlorophenyl)propanoic acid
  MOD_RES (13)..(13): (S)-2-amino-3-(benzo[b]thiophen-3-yl)propanoic acid
  C-term (S)-2-aminopropan-1-ol
XDXXDDAAFLXFX

SEQ ID NO: 926 - protein, 13 aa, Artificial Sequence
  Description of Artificial Sequence: Synthetic peptide
  N-term Acetic Acid
  MOD_RES (1)..(1): (R)-2-allylpyrrolidine-2-carboxylic acid
  MOD_RES (3)..(3): (S)-2-amino-4,4-dimethylpentanoic acid
  MOD_RES (4)..(4): 2-amino-2-(pent-4-en-1-yl)hept-6-enoic acid
  MOD_RES (11)..(11): (S)-3-amino-1-((pent-4-en-1-yloxy)carbonyl)pyrrolidine-3- carboxylic acid
  MOD_RES (12)..(12): (S)-2-amino-3-(2-chlorophenyl)propanoic acid
  MOD_RES (13)..(13): (S)-2-amino-3-(benzo[b]thiophen-3-yl)propanoic acid
  C-term (S)-2-amino-4-methylpentan-1-ol
XDXXDDAAFLXFX

SEQ ID NO: 927 - protein, 14 aa, Artificial Sequence
  Description of Artificial Sequence: Synthetic peptide
  N-term octanoic acid
  MOD_RES (1)..(1): (R)-2-allylpyrrolidine-2-carboxylic acid
  MOD_RES (3)..(3): (S)-2-amino-4,4-dimethylpentanoic acid
  MOD_RES (4)..(4): 2-amino-2-(pent-4-en-1-yl)hept-6-enoic acid
  MOD_RES (11)..(11): (S)-3-amino-1-((pent-4-en-1-yloxy)carbonyl)pyrrolidine-3- carboxylic acid
  MOD_RES (12)..(12): (S)-2-amino-3-(2-chlorophenyl)propanoic acid
  MOD_RES (13)..(13): (S)-2-amino-3-(benzo[b]thiophen-3-yl)propanoic acid
  MOD_RES (14)..(14): D-threonine
  C-term amino
XDXXDDAAFNXFXT

SEQ ID NO: 928 - protein, 14 aa, Artificial Sequence
  Description of Artificial Sequence: Synthetic peptide
  N-term 3-(2-methoxyethoxy)propanoic acid
  MOD_RES (1)..(1): (R)-2-allylpyrrolidine-2-carboxylic acid
  MOD_RES (3)..(3): (S)-2-amino-4,4-dimethylpentanoic acid
  MOD_RES (4)..(4): 2-amino-2-(pent-4-en-1-yl)hept-6-enoic acid
  MOD_RES (11)..(11): (S)-3-amino-1-((pent-4-en-1-yloxy)carbonyl)pyrrolidine-3- carboxylic acid
  MOD_RES (12)..(12): (S)-2-amino-3-(2-chlorophenyl)propanoic acid
  MOD_RES (13)..(13): (S)-2-amino-3-(benzo[b]thiophen-3-yl)propanoic acid
  MOD_RES (14)..(14): D-threonine
  C-term amino
XDXXDDAAFNXFXT

SEQ ID NO: 929 - protein, 14 aa, Artificial Sequence
  Description of Artificial Sequence: Synthetic peptide
  N-term octanoic acid
  MOD_RES (1)..(1): (R)-2-allylpyrrolidine-2-carboxylic acid
  MOD_RES (3)..(3): (S)-2-amino-4,4-dimethylpentanoic acid
  MOD_RES (4)..(4): 2-amino-2-(pent-4-en-1-yl)hept-6-enoic acid
  MOD_RES (11)..(11): (S)-2-amino-2-methyldec-9-enoic acid
  MOD_RES (12)..(12): (S)-2-amino-3-(2-chlorophenyl)propanoic acid
  MOD_RES (13)..(13): (S)-2-amino-3-(benzo[b]thiophen-3-yl)propanoic acid
  C-term amino
XDXXDDAAFTXFXQ

SEQ ID NO: 930 - protein, 14 aa, Artificial Sequence
  Description of Artificial Sequence: Synthetic peptide
  N-term 3-(2-methoxyethoxy)propanoic acid
  MOD_RES (1)..(1): (R)-2-allylpyrrolidine-2-carboxylic acid
  MOD_RES (3)..(3): (S)-2-amino-4,4-dimethylpentanoic acid
  MOD_RES (4)..(4): 2-amino-2-(pent-4-en-1-yl)hept-6-enoic acid
  MOD_RES (11)..(11): (S)-2-amino-2-methyldec-9-enoic acid
  MOD_RES (12)..(12): (S)-2-amino-3-(2-chlorophenyl)propanoic acid
  MOD_RES (13)..(13): (S)-2-amino-3-(benzo[b]thiophen-3-yl)propanoic acid
  C-term amino
XDXXDDAAFTXFXQ

SEQ ID NO: 931 - protein, 14 aa, Artificial Sequence
  Description of Artificial Sequence: Synthetic peptide
  N-term Acetic Acid
  MOD_RES (1)..(1): (R)-2-allylpyrrolidine-2-carboxylic acid
  MOD_RES (3)..(3): (S)-2-amino-4,4-dimethylpentanoic acid
  MOD_RES (4)..(4): 2-amino-2-(pent-4-en-1-yl)hept-6-enoic acid
  MOD_RES (11)..(11): (S)-3-amino-1-((but-3-en-1-yloxy)carbonyl)pyrrolidine-3- carboxylic acid
  MOD_RES (12)..(12): (S)-2-amino-3-(2-chlorophenyl)propanoic acid
  MOD_RES (13)..(13): (S)-2-amino-3-(benzo[b]thiophen-3-yl)propanoic acid
  MOD_RES (14)..(14): D-threonine
  C-term amino
XDXXDDAAFNXFXT

SEQ ID NO: 932 - protein, 14 aa, Artificial Sequence
  Description of Artificial Sequence: Synthetic peptide
  N-term Acetic Acid
  MOD_RES (1)..(1): (R)-2-allylpyrrolidine-2-carboxylic acid
  MOD_RES (3)..(3): (S)-2-amino-4,4-dimethylpentanoic acid
  MOD_RES (4)..(4): 2-amino-2-(pent-4-en-1-yl)hept-6-enoic acid
  MOD_RES (11)..(11): (S)-3-amino-1-((pent-4-en-1-yloxy)carbonyl)pyrrolidine-3- carboxylic acid
  MOD_RES (12)..(12): (S)-2-amino-3-(thiophen-3-yl)propanoic acid
  MOD_RES (13)..(13): (S)-2-amino-3-(benzo[b]thiophen-3-yl)propanoic acid
  C-term phenylmethanamine
XDXXDDAAFNXXXQ

SEQ ID NO: 933 - protein, 14 aa, Artificial Sequence
  Description of Artificial Sequence: Synthetic peptide
  N-term methanesulfonic acid
  MOD_RES (1)..(1): (R)-2-allylpyrrolidine-2-carboxylic acid
  MOD_RES (3)..(3): (S)-2-amino-4,4-dimethylpentanoic acid
  MOD_RES (4)..(4): 2-amino-2-(pent-4-en-1-yl)hept-6-enoic acid
  MOD_RES (11)..(11): (S)-3-amino-1-((pent-4-en-1-yloxy)carbonyl)pyrrolidine-3- carboxylic acid
  MOD_RES (12)..(12): (S)-2-amino-3-(2-chlorophenyl)propanoic acid
  MOD_RES (13)..(13): (S)-2-amino-3-(benzo[b]thiophen-3-yl)propanoic acid
  MOD_RES (14)..(14): D-threonine
  C-term amino
XDXXDDAAFNXFXT

SEQ ID NO: 934 - protein, 14 aa, Artificial Sequence
  Description of Artificial Sequence: Synthetic peptide
  N-term 3-methoxypropanoic acid
  MOD_RES (1)..(1): (R)-2-allylpyrrolidine-2-carboxylic acid
  MOD_RES (3)..(3): (S)-2-amino-4,4-dimethylpentanoic acid
  MOD_RES (4)..(4): 2-amino-2-(pent-4-en-1-yl)hept-6-enoic acid
  MOD_RES (11)..(11): (S)-3-amino-1-((pent-4-en-1-yloxy)carbonyl)pyrrolidine-3- carboxylic acid
  MOD_RES (12)..(12): (S)-2-amino-3-(2-chlorophenyl)propanoic acid
  MOD_RES (13)..(13): (S)-2-amino-3-(benzo[b]thiophen-3-yl)propanoic acid
  MOD_RES (14)..(14): D-threonine
  C-term amino
XDXXDDAAFNXFXT

SEQ ID NO: 935 - protein, 14 aa, Artificial Sequence
  Description of Artificial Sequence: Synthetic peptide
  N-term methanesulfonic acid
  MOD_RES (1)..(1): (R)-2-allylpyrrolidine-2-carboxylic acid
  MOD_RES (3)..(3): (S)-2-amino-4,4-dimethylpentanoic acid
  MOD_RES (4)..(4): 2-amino-2-(pent-4-en-1-yl)hept-6-enoic acid
  MOD_RES (11)..(11): (S)-2-amino-2-methyldec-9-enoic acid
  MOD_RES (12)..(12): (S)-2-amino-3-(2-chlorophenyl)propanoic acid
  MOD_RES (13)..(13): (S)-2-amino-3-(benzo[b]thiophen-3-yl)propanoic acid
  C-term amino
XDXXDDAAFTXFXQ

SEQ ID NO: 936 - protein, 14 aa, Artificial Sequence
  Description of Artificial Sequence: Synthetic peptide
  N-term 3-methoxypropanoic acid
  MOD_RES (1)..(1): (R)-2-allylpyrrolidine-2-carboxylic acid
  MOD_RES (3)..(3): (S)-2-amino-4,4-dimethylpentanoic acid
  MOD_RES (4)..(4): 2-amino-2-(pent-4-en-1-yl)hept-6-enoic acid
  MOD_RES (11)..(11): (S)-2-amino-2-methyldec-9-enoic acid
  MOD_RES (12)..(12): (S)-2-amino-3-(2-chlorophenyl)propanoic acid
  MOD_RES (13)..(13): (S)-2-amino-3-(benzo[b]thiophen-3-yl)propanoic acid
  C-term amino
XDXXDDAAFTXFXQ

SEQ ID NO: 937 - protein, 14 aa, Artificial Sequence
  Description of Artificial Sequence: Synthetic peptide
  N-term Acetic Acid
  MOD_RES (1)..(1): (R)-2-allylpyrrolidine-2-carboxylic acid
  MOD_RES (3)..(3): (S)-2-amino-4,4-dimethylpentanoic acid
  MOD_RES (4)..(4): 2-amino-2-(pent-4-en-1-yl)hept-6-enoic acid
  MOD_RES (11)..(11): (S)-2-amino-2-methyldodec-11-enoic acid
  MOD_RES (12)..(12): (S)-2-amino-3-(2-chlorophenyl)propanoic acid
  MOD_RES (13)..(13): (S)-2-amino-3-(benzo[b]thiophen-3-yl)propanoic acid
  C-term amino
XDXXDDAAFTXFXT

SEQ ID NO: 938 - protein, 14 aa, Artificial Sequence
  Description of Artificial Sequence: Synthetic peptide
  N-term Acetic Acid
  MOD_RES (1)..(1): (R)-2-allylpyrrolidine-2-carboxylic acid
  MOD_RES (3)..(3): (S)-2-amino-4,4-dimethylpentanoic acid
  MOD_RES (4)..(4): 2-amino-2-(pent-4-en-1-yl)hept-6-enoic acid
  MOD_RES (11)..(11): (S)-3-amino-1-((pent-4-en-1-yloxy)carbonyl)pyrrolidine-3- carboxylic acid
  MOD_RES (13)..(13): (S)-2-amino-3-(benzo[b]thiophen-3-yl)propanoic acid
  C-term amino
XDXXDTAAFTXFXS

SEQ ID NO: 939 - protein, 14 aa, Artificial Sequence
  Description of Artificial Sequence: Synthetic peptide
  N-term Acetic Acid
  MOD_RES (1)..(1): (R)-2-allylpyrrolidine-2-carboxylic acid
  MOD_RES (3)..(3): (S)-2-amino-4,4-dimethylpentanoic acid
  MOD_RES (4)..(4): 2-amino-2-(pent-4-en-1-yl)hept-6-enoic acid
  MOD_RES (11)..(11): (S)-3-amino-1-((pent-4-en-1-yloxy)carbonyl)pyrrolidine-3- carboxylic acid
  MOD_RES (13)..(13): (S)-2-amino-3-(benzo[b]thiophen-3-yl)propanoic acid
  C-term amino
XDXXDTLAFTXFXS

SEQ ID NO: 940 - protein, 14 aa, Artificial Sequence
  Description of Artificial Sequence: Synthetic peptide
  N-term Acetic Acid
  MOD_RES (1)..(1): (R)-2-allylpyrrolidine-2-carboxylic acid
  MOD_RES (3)..(3): (S)-2-amino-4,4-dimethylpentanoic acid
  MOD_RES (4)..(4): 2-amino-2-(pent-4-en-1-yl)hept-6-enoic acid
  MOD_RES (11)..(11): (S)-3-amino-1-((pent-4-en-1-yloxy)carbonyl)pyrrolidine-3- carboxylic acid
  MOD_RES (13)..(13): (S)-2-amino-3-(benzo[b]thiophen-3-yl)propanoic acid
  C-term amino
XDXXDTALFTXFXS

SEQ ID NO: 941 - protein, 14 aa, Artificial Sequence
  Description of Artificial Sequence: Synthetic peptide
  N-term Acetic Acid
  MOD_RES (1)..(1): (R)-2-allylpyrrolidine-2-carboxylic acid
  MOD_RES (3)..(3): (S)-2-amino-4,4-dimethylpentanoic acid
  MOD_RES (4)..(4): 2-amino-2-(pent-4-en-1-yl)hept-6-enoic acid
  MOD_RES (9)..(9): (S)-2-amino-3-(naphthalen-1-yl)propanoic acid
  MOD_RES (11)..(11): (S)-3-amino-1-((pent-4-en-1-yloxy)carbonyl)pyrrolidine-3- carboxylic acid
  MOD_RES (13)..(13): (S)-2-amino-3-(benzo[b]thiophen-3-yl)propanoic acid
  C-term amino
XDXXDTAAXTXFXS

SEQ ID NO: 942 - protein, 14 aa, Artificial Sequence
  Description of Artificial Sequence: Synthetic peptide
  N-term Acetic Acid
  MOD_RES (1)..(1): (R)-2-allylpyrrolidine-2-carboxylic acid
  MOD_RES (3)..(3): (S)-2-amino-4,4-dimethylpentanoic acid
  MOD_RES (4)..(4): 2-amino-2-(pent-4-en-1-yl)hept-6-enoic acid
  MOD_RES (9)..(9): (S)-2-amino-3-(naphthalen-2-yl)propanoic acid
  MOD_RES (11)..(11): (S)-3-amino-1-((pent-4-en-1-yloxy)carbonyl)pyrrolidine-3- carboxylic acid
  MOD_RES (13)..(13): (S)-2-amino-3-(benzo[b]thiophen-3-yl)propanoic acid
  C-term amino
XDXXDTAAXTXFXS

SEQ ID NO: 943 - protein, 14 aa, Artificial Sequence
  Description of Artificial Sequence: Synthetic peptide
  N-term Acetic Acid
  MOD_RES (1)..(1): (R)-2-allylpyrrolidine-2-carboxylic acid
  MOD_RES (3)..(3): (S)-2-amino-4,4-dimethylpentanoic acid
  MOD_RES (4)..(4): 2-amino-2-(pent-4-en-1-yl)hept-6-enoic acid
  MOD_RES (9)..(9): (S)-2-amino-3-(3-(trifluoromethyl)phenyl)propanoic acid
  MOD_RES (11)..(11): (S)-3-amino-1-((pent-4-en-1-yloxy)carbonyl)pyrrolidine-3- carboxylic acid
  MOD_RES (13)..(13): (S)-2-amino-3-(benzo[b]thiophen-3-yl)propanoic acid
  C-term amino
XDXXDTAAFTXFXS

SEQ ID NO: 944 - protein, 14 aa, Artificial Sequence
  Description of Artificial Sequence: Synthetic peptide
  N-term Acetic Acid
  MOD_RES (1)..(1): (R)-2-allylpyrrolidine-2-carboxylic acid
  MOD_RES (3)..(3): (S)-2-amino-4,4-dimethylpentanoic acid
  MOD_RES (4)..(4): 2-amino-2-(pent-4-en-1-yl)hept-6-enoic acid
  MOD_RES (11)..(11): (S)-3-amino-1-((pent-4-en-1-yloxy)carbonyl)pyrrolidine-3- carboxylic acid
  MOD_RES (12)..(12): (S)-2-amino-3-(naphthalen-1-yl)propanoic acid
  MOD_RES (13)..(13): (S)-2-amino-3-(benzo[b]thiophen-3-yl)propanoic acid
  C-term amino
XDXXDTAAFTXXXS

SEQ ID NO: 945 - protein, 14 aa, Artificial Sequence
  Description of Artificial Sequence: Synthetic peptide
  N-term Acetic Acid
  MOD_RES (1)..(1): (R)-2-allylpyrrolidine-2-carboxylic acid
  MOD_RES (3)..(3): (S)-2-amino-4,4-dimethylpentanoic acid
  MOD_RES (4)..(4): 2-amino-2-(pent-4-en-1-yl)hept-6-enoic acid
  MOD_RES (11)..(11): (S)-3-amino-1-((pent-4-en-1-yloxy)carbonyl)pyrrolidine-3- carboxylic acid
  MOD_RES (12)..(12): (S)-2-amino-3-(naphthalen-2-yl)propanoic acid
  MOD_RES (13)..(13): (S)-2-amino-3-(benzo[b]thiophen-3-yl)propanoic acid
  C-term amino
XDXXDTAAFTXXXS

SEQ ID NO: 946 - protein, 14 aa, Artificial Sequence
  Description of Artificial Sequence: Synthetic peptide
  N-term Acetic Acid
  MOD_RES (1)..(1): (R)-2-allylpyrrolidine-2-carboxylic acid
  MOD_RES (3)..(3): (S)-2-amino-4,4-dimethylpentanoic acid
  MOD_RES (4)..(4): 2-amino-2-(pent-4-en-1-yl)hept-6-enoic acid
  MOD_RES (11)..(11): (S)-3-amino-1-((pent-4-en-1-yloxy)carbonyl)pyrrolidine-3- carboxylic acid
  MOD_RES (12)..(12): (S)-2-amino-3-(3-(trifluoromethyl)phenyl)propanoic acid
  MOD_RES (13)..(13): (S)-2-amino-3-(benzo[b]thiophen-3-yl)propanoic acid
  C-term amino
XDXXDTAAFTXFXS

SEQ ID NO: 947 - protein, 14 aa, Artificial Sequence
  Description of Artificial Sequence: Synthetic peptide
  N-term Acetic Acid
  MOD_RES (1)..(1): (R)-2-allylpyrrolidine-2-carboxylic acid
  MOD_RES (3)..(3): (S)-2-amino-4,4-dimethylpentanoic acid
  MOD_RES (4)..(4): 2-amino-2-(pent-4-en-1-yl)hept-6-enoic acid
  MOD_RES (11)..(11): (S)-3-amino-1-((pent-4-en-1-yloxy)carbonyl)pyrrolidine-3- carboxylic acid
  MOD_RES (13)..(13): (S)-2-amino-3-(naphthalen-1-yl)propanoic acid
  C-term amino
XDXXDTAAFTXFXS

SEQ ID NO: 948 - protein, 14 aa, Artificial Sequence
  Description of Artificial Sequence: Synthetic peptide
  N-term Acetic Acid
  MOD_RES (1)..(1): (R)-2-allylpyrrolidine-2-carboxylic acid
  MOD_RES (3)..(3): (S)-2-amino-4,4-dimethylpentanoic acid
  MOD_RES (4)..(4): 2-amino-2-(pent-4-en-1-yl)hept-6-enoic acid
  MOD_RES (7)..(7): N6-isopropyl-L-lysine
  MOD_RES (11)..(11): (S)-3-amino-1-((pent-4-en-1-yloxy)carbonyl)pyrrolidine-3- carboxylic acid
  MOD_RES (12)..(12): (S)-2-amino-3-(2-chlorophenyl)propanoic acid
  MOD_RES (13)..(13): (S)-2-amino-3-(benzo[b]thiophen-3-yl)propanoic acid
  C-term amino
XDXXDDKAFTXFXT

SEQ ID NO: 949 - protein, 14 aa, Artificial Sequence
  Description of Artificial Sequence: Synthetic peptide
  N-term Acetic Acid
  MOD_RES (1)..(1): (R)-2-allylpyrrolidine-2-carboxylic acid
  MOD_RES (3)..(3): (S)-2-amino-4,4-dimethylpentanoic acid
  MOD_RES (4)..(4): 2-amino-2-(pent-4-en-1-yl)hept-6-enoic acid
  MOD_RES (7)..(7): N6-isopropyl-L-lysine
  MOD_RES (11)..(11): (S)-3-amino-1-((pent-4-en-1-yloxy)carbonyl)pyrrolidine-3- carboxylic acid
  MOD_RES (12)..(12): (S)-2-amino-3-(2-chlorophenyl)propanoic acid
  MOD_RES (13)..(13): (S)-2-amino-3-(benzo[b]thiophen-3-yl)propanoic acid
  C-term amino
XDXXDDKAFTXFXL

SEQ ID NO: 950 - protein, 14 aa, Artificial Sequence
  Description of Artificial Sequence: Synthetic peptide
  N-term Acetic Acid
  MOD_RES (1)..(1): (R)-2-allylpyrrolidine-2-carboxylic acid
  MOD_RES (3)..(3): (S)-2-amino-4,4-dimethylpentanoic acid
  MOD_RES (4)..(4): 2-amino-2-(pent-4-en-1-yl)hept-6-enoic acid
  MOD_RES (7)..(7): N6-isopropyl-L-lysine
  MOD_RES (11)..(11): (S)-3-amino-1-((pent-4-en-1-yloxy)carbonyl)pyrrolidine-3- carboxylic acid
  MOD_RES (12)..(12): (S)-2-amino-3-(2-chlorophenyl)propanoic acid
  MOD_RES (13)..(13): (S)-2-amino-3-(benzo[b]thiophen-3-yl)propanoic acid
  C-term amino
XDXXDDKAFLXFXQ

SEQ ID NO: 951 - protein, 14 aa, Artificial Sequence
  Description of Artificial Sequence: Synthetic peptide
  N-term Acetic Acid
  MOD_RES (1)..(1): (R)-2-allylpyrrolidine-2-carboxylic acid
  MOD_RES (3)..(3): (S)-2-amino-4,4-dimethylpentanoic acid
  MOD_RES (4)..(4): 2-amino-2-(pent-4-en-1-yl)hept-6-enoic acid
  MOD_RES (7)..(7): N6-isopropyl-L-lysine
  MOD_RES (11)..(11): (S)-3-amino-1-((pent-4-en-1-yloxy)carbonyl)pyrrolidine-3- carboxylic acid
  MOD_RES (12)..(12): (S)-2-amino-3-(2-chlorophenyl)propanoic acid
  MOD_RES (13)..(13): (S)-2-amino-3-(benzo[b]thiophen-3-yl)propanoic acid
  C-term amino
XDXXDDKAFLXFXT

SEQ ID NO: 952 - protein, 14 aa, Artificial Sequence
  Description of Artificial Sequence: Synthetic peptide
  N-term Acetic Acid
  MOD_RES (1)..(1): (R)-2-allylpyrrolidine-2-carboxylic acid
  MOD_RES (3)..(3): (S)-2-amino-4,4-dimethylpentanoic acid
  MOD_RES (4)..(4): 2-amino-2-(pent-4-en-1-yl)hept-6-enoic acid
  MOD_RES (7)..(7): N6-isopropyl-L-lysine
  MOD_RES (11)..(11): (S)-3-amino-1-((pent-4-en-1-yloxy)carbonyl)pyrrolidine-3- carboxylic acid
  MOD_RES (12)..(12): (S)-2-amino-3-(2-chlorophenyl)propanoic acid
  MOD_RES (13)..(13): (S)-2-amino-3-(benzo[b]thiophen-3-yl)propanoic acid
  C-term amino
XDXXDDKAFLXFXL

SEQ ID NO: 953 - protein, 14 aa, Artificial Sequence
  Description of Artificial Sequence: Synthetic peptide
  N-term Acetic Acid
  MOD_RES (1)..(1): (R)-2-allylpyrrolidine-2-carboxylic acid
  MOD_RES (3)..(3): (S)-2-amino-4,4-dimethylpentanoic acid
  MOD_RES (4)..(4): 2-amino-2-(pent-4-en-1-yl)hept-6-enoic acid
  MOD_RES (10)..(10): N6-isopropyl-L-lysine
  MOD_RES (11)..(11): (S)-3-amino-1-((pent-4-en-1-yloxy)carbonyl)pyrrolidine-3- carboxylic acid
  MOD_RES (12)..(12): (S)-2-amino-3-(2-chlorophenyl)propanoic acid
  MOD_RES (13)..(13): (S)-2-amino-3-(benzo[b]thiophen-3-yl)propanoic acid
  C-term amino
XDXXDDAAFKXFXQ

SEQ ID NO: 954 - protein, 14 aa, Artificial Sequence
  Description of Artificial Sequence: Synthetic peptide
  N-term Acetic Acid
  MOD_RES (1)..(1): (R)-2-allylpyrrolidine-2-carboxylic acid
  MOD_RES (3)..(3): (S)-2-amino-4,4-dimethylpentanoic acid
  MOD_RES (4)..(4): 2-amino-2-(pent-4-en-1-yl)hept-6-enoic acid
  MOD_RES (10)..(10): N6-isopropyl-L-lysine
  MOD_RES (11)..(11): (S)-3-amino-1-((pent-4-en-1-yloxy)carbonyl)pyrrolidine-3- carboxylic acid
  MOD_RES (12)..(12): (S)-2-amino-3-(2-chlorophenyl)propanoic acid
  MOD_RES (13)..(13): (S)-2-amino-3-(benzo[b]thiophen-3-yl)propanoic acid
  C-term amino
XDXXDDAAFKXFXT

SEQ ID NO: 955 - protein, 14 aa, Artificial Sequence
  Description of Artificial Sequence: Synthetic peptide
  N-term Acetic Acid
  MOD_RES (1)..(1): (R)-2-allylpyrrolidine-2-carboxylic acid
  MOD_RES (3)..(3): (S)-2-amino-4,4-dimethylpentanoic acid
  MOD_RES (4)..(4): 2-amino-2-(pent-4-en-1-yl)hept-6-enoic acid
  MOD_RES (10)..(10): N6-isopropyl-L-lysine
  MOD_RES (11)..(11): (S)-3-amino-1-((pent-4-en-1-yloxy)carbonyl)pyrrolidine-3- carboxylic acid
  MOD_RES (12)..(12): (S)-2-amino-3-(2-chlorophenyl)propanoic acid
  MOD_RES (13)..(13): (S)-2-amino-3-(benzo[b]thiophen-3-yl)propanoic acid
  C-term amino
XDXXDDAAFKXFXL

SEQ ID NO: 956 - protein, 14 aa, Artificial Sequence
  Description of Artificial Sequence: Synthetic peptide
  N-term Acetic Acid
  MOD_RES (1)..(1): (R)-2-allylpyrrolidine-2-carboxylic acid
  MOD_RES (3)..(3): (S)-2-amino-4,4-dimethylpentanoic acid
  MOD_RES (4)..(4): 2-amino-2-(pent-4-en-1-yl)hept-6-enoic acid
  MOD_RES (10)..(10): N6-isopropyl-L-lysine
  MOD_RES (11)..(11): (S)-3-amino-1-((pent-4-en-1-yloxy)carbonyl)pyrrolidine-3- carboxylic acid
  MOD_RES (12)..(12): (S)-2-amino-3-(2-chlorophenyl)propanoic acid
  MOD_RES (13)..(13): (S)-2-amino-3-(benzo[b]thiophen-3-yl)propanoic acid
  C-term amino
XDXXDEAAFKXFXQ

SEQ ID NO: 957 - protein, 14 aa, Artificial Sequence
  Description of Artificial Sequence: Synthetic peptide
  N-term Acetic Acid
  MOD_RES (1)..(1): (R)-2-allylpyrrolidine-2-carboxylic acid
  MOD_RES (3)..(3): (S)-2-amino-4,4-dimethylpentanoic acid
  MOD_RES (4)..(4): 2-amino-2-(pent-4-en-1-yl)hept-6-enoic acid
  MOD_RES (10)..(10): N6-isopropyl-L-lysine
  MOD_RES (11)..(11): (S)-3-amino-1-((pent-4-en-1-yloxy)carbonyl)pyrrolidine-3- carboxylic acid
  MOD_RES (12)..(12): (S)-2-amino-3-(2-chlorophenyl)propanoic acid
  MOD_RES (13)..(13): (S)-2-amino-3-(benzo[b]thiophen-3-yl)propanoic acid
  C-term amino
XDXXDEAAFKXFXT

SEQ ID NO: 958 - protein, 14 aa, Artificial Sequence
  Description of Artificial Sequence: Synthetic peptide
  N-term Acetic Acid
  MOD_RES (1)..(1): (R)-2-allylpyrrolidine-2-carboxylic acid
  MOD_RES (3)..(3): (S)-2-amino-4,4-dimethylpentanoic acid
  MOD_RES (4)..(4): 2-amino-2-(pent-4-en-1-yl)hept-6-enoic acid
  MOD_RES (10)..(10): N6-isopropyl-L-lysine
  MOD_RES (11)..(11): (S)-3-amino-1-((pent-4-en-1-yloxy)carbonyl)pyrrolidine-3- carboxylic acid
  MOD_RES (12)..(12): (S)-2-amino-3-(2-chlorophenyl)propanoic acid
  MOD_RES (13)..(13): (S)-2-amino-3-(benzo[b]thiophen-3-yl)propanoic acid
  C-term amino
XDXXDEAAFKXFXL

SEQ ID NO: 959 - protein, 14 aa, Artificial Sequence
  Description of Artificial Sequence: Synthetic peptide
  N-term Acetic Acid
  MOD_RES (1)..(1): (R)-2-allylpyrrolidine-2-carboxylic acid
  MOD_RES (3)..(3): (S)-2-amino-4,4-dimethylpentanoic acid
  MOD_RES (4)..(4): 2-amino-2-(pent-4-en-1-yl)hept-6-enoic acid
  MOD_RES (11)..(11): (S)-3-amino-1-((pent-4-en-1-yloxy)carbonyl)pyrrolidine-3- carboxylic acid
  MOD_RES (13)..(13): (S)-2-amino-3-(benzo[b]thiophen-3-yl)propanoic acid
  C-term amino
XNXXDTAAFLXFXQ

SEQ ID NO: 960 - protein, 14 aa, Artificial Sequence
  Description of Artificial Sequence: Synthetic peptide
  N-term Acetic Acid
  MOD_RES (1)..(1): (R)-2-allylpyrrolidine-2-carboxylic acid
  MOD_RES (4)..(4): 2-amino-2-(pent-4-en-1-yl)hept-6-enoic acid
  MOD_RES (11)..(11): (S)-3-amino-1-((pent-4-en-1-yloxy)carbonyl)pyrrolidine-3- carboxylic acid
  MOD_RES (13)..(13): (S)-2-amino-3-(benzo[b]thiophen-3-yl)propanoic acid
  C-term amino
XNAXDTAAFLXFXQ

SEQ ID NO: 961 - protein, 14 aa, Artificial Sequence
  Description of Artificial Sequence: Synthetic peptide
  N-term Acetic Acid
  MOD_RES (1)..(1): (R)-2-allylpyrrolidine-2-carboxylic acid
  MOD_RES (3)..(3): (S)-2-amino-4,4-dimethylpentanoic acid
  MOD_RES (4)..(4): 2-amino-2-(pent-4-en-1-yl)hept-6-enoic acid
  MOD_RES (7)..(7): N6-isopropyl-L-lysine
  MOD_RES (11)..(11): (S)-3-amino-1-((pent-4-en-1-yloxy)carbonyl)pyrrolidine-3- carboxylic acid
  MOD_RES (13)..(13): (S)-2-amino-3-(benzo[b]thiophen-3-yl)propanoic acid
  C-term amino
XNXXDTKAFLXFXQ

SEQ ID NO: 962 - protein, 14 aa, Artificial Sequence
  Description of Artificial Sequence: Synthetic peptide
  N-term Acetic Acid
  MOD_RES (1)..(1): (R)-2-allylpyrrolidine-2-carboxylic acid
  MOD_RES (3)..(3): (S)-2-amino-4,4-dimethylpentanoic acid
  MOD_RES (4)..(4): 2-amino-2-(pent-4-en-1-yl)hept-6-enoic acid
  MOD_RES (11)..(11): (S)-3-amino-1-((pent-4-en-1-yloxy)carbonyl)pyrrolidine-3- carboxylic acid
  MOD_RES (13)..(13): (S)-2-amino-3-(naphthalen-1-yl)propanoic acid
  C-term amino
XNXXDTAAFLXFXQ

SEQ ID NO: 963 - protein, 14 aa, Artificial Sequence
  Description of Artificial Sequence: Synthetic peptide
  N-term Acetic Acid
  MOD_RES (1)..(1): (R)-2-allylpyrrolidine-2-carboxylic acid
  MOD_RES (3)..(3): (S)-2-amino-4,4-dimethylpentanoic acid
  MOD_RES (4)..(4): 2-amino-2-(pent-4-en-1-yl)hept-6-enoic acid
  MOD_RES (11)..(11): (S)-3-amino-1-((pent-4-en-1-yloxy)carbonyl)pyrrolidine-3- carboxylic acid
  MOD_RES (13)..(13): (S)-2-amino-3-(naphthalen-2-yl)propanoic acid
  C-term amino
XNXXDTAAFLXFXQ

SEQ ID NO: 964 - protein, 14 aa, Artificial Sequence
  Description of Artificial Sequence: Synthetic peptide
  N-term Acetic Acid
  MOD_RES (1)..(1): (R)-2-allylpyrrolidine-2-carboxylic acid
  MOD_RES (3)..(3): (S)-2-amino-4,4-dimethylpentanoic acid
  MOD_RES (4)..(4): 2-amino-2-(pent-4-en-1-yl)hept-6-enoic acid
  MOD_RES (11)..(11): (S)-3-amino-1-((pent-4-en-1-yloxy)carbonyl)pyrrolidine-3- carboxylic acid
  MOD_RES (13)..(13): (S)-2-amino-3-(benzo[b]thiophen-3-yl)propanoic acid
  C-term amino
XNXXDTAAFLXFXT

SEQ ID NO: 965 - protein, 14 aa, Artificial Sequence
  Description of Artificial Sequence: Synthetic peptide
  N-term Acetic Acid
  MOD_RES (1)..(1): (R)-2-allylpyrrolidine-2-carboxylic acid
  MOD_RES (3)..(3): (S)-2-amino-4,4-dimethylpentanoic acid
  MOD_RES (4)..(4): 2-amino-2-(pent-4-en-1-yl)hept-6-enoic acid
  MOD_RES (11)..(11): (S)-3-amino-1-((pent-4-en-1-yloxy)carbonyl)pyrrolidine-3- carboxylic acid
  MOD_RES (13)..(13): (S)-2-amino-3-(benzo[b]thiophen-3-yl)propanoic acid
  C-term amino
XDXXNTAAFLXFXQ

SEQ ID NO: 966 - protein, 14 aa, Artificial Sequence
  Description of Artificial Sequence: Synthetic peptide
  N-term Acetic Acid
  MOD_RES (1)..(1): (R)-2-allylpyrrolidine-2-carboxylic acid
  MOD_RES (4)..(4): 2-amino-2-(pent-4-en-1-yl)hept-6-enoic acid
  MOD_RES (11)..(11): (S)-3-amino-1-((pent-4-en-1-yloxy)carbonyl)pyrrolidine-3- carboxylic acid
  MOD_RES (13)..(13): (S)-2-amino-3-(benzo[b]thiophen-3-yl)propanoic acid
  C-term amino
XDAXNTAAFLXFXQ

SEQ ID NO: 967 - protein, 14 aa, Artificial Sequence
  Description of Artificial Sequence: Synthetic peptide
  N-term Acetic Acid
  MOD_RES (1)..(1): (R)-2-allylpyrrolidine-2-carboxylic acid
  MOD_RES (3)..(3): (S)-2-amino-4,4-dimethylpentanoic acid
  MOD_RES (4)..(4): 2-amino-2-(pent-4-en-1-yl)hept-6-enoic acid
  MOD_RES (7)..(7): N6-isopropyl-L-lysine
  MOD_RES (11)..(11): (S)-3-amino-1-((pent-4-en-1-yloxy)carbonyl)pyrrolidine-3- carboxylic acid
  MOD_RES (13)..(13): (S)-2-amino-3-(benzo[b]thiophen-3-yl)propanoic acid
  C-term amino
XDXXNTKAFLXFXQ

SEQ ID NO: 968 - protein, 14 aa, Artificial Sequence
  Description of Artificial Sequence: Synthetic peptide
  N-term Acetic Acid
  MOD_RES (1)..(1): (R)-2-allylpyrrolidine-2-carboxylic acid
  MOD_RES (3)..(3): (S)-2-amino-4,4-dimethylpentanoic acid
  MOD_RES (4)..(4): 2-amino-2-(pent-4-en-1-yl)hept-6-enoic acid
  MOD_RES (11)..(11): (S)-3-amino-1-((pent-4-en-1-yloxy)carbonyl)pyrrolidine-3- carboxylic acid
  MOD_RES (13)..(13): (S)-2-amino-3-(naphthalen-1-yl)propanoic acid
  C-term amino
XDXXNTAAFLXFXQ

SEQ ID NO: 969 - protein, 14 aa, Artificial Sequence
  Description of Artificial Sequence: Synthetic peptide
  N-term Acetic Acid
  MOD_RES (1)..(1): (R)-2-allylpyrrolidine-2-carboxylic acid
  MOD_RES (3)..(3): (S)-2-amino-4,4-dimethylpentanoic acid
  MOD_RES (4)..(4): 2-amino-2-(pent-4-en-1-yl)hept-6-enoic acid
  MOD_RES (11)..(11): (S)-3-amino-1-((pent-4-en-1-yloxy)carbonyl)pyrrolidine-3- carboxylic acid
  MOD_RES (13)..(13): (S)-2-amino-3-(benzo[b]thiophen-3-yl)propanoic acid
  C-term amino
XDXXNTAAFLXFXT

SEQ ID NO: 970 - protein, 14 aa, Artificial Sequence
  Description of Artificial Sequence: Synthetic peptide
  N-term Acetic Acid
  MOD_RES (1)..(1): (R)-2-allylpyrrolidine-2-carboxylic acid
  MOD_RES (3)..(3): (S)-2-amino-4,4-dimethylpentanoic acid
  MOD_RES (4)..(4): 2-amino-2-(pent-4-en-1-yl)hept-6-enoic acid
  MOD_RES (11)..(11): (S)-3-amino-1-((pent-4-en-1-yloxy)carbonyl)pyrrolidine-3- carboxylic acid
  MOD_RES (13)..(13): (S)-2-amino-3-(benzo[b]thiophen-3-yl)propanoic acid
  C-term amino
XNXXNTAAFLXFXQ

SEQ ID NO: 971 - protein, 13 aa, Artificial Sequence
  Description of Artificial Sequence: Synthetic peptide
  N-term Acetic Acid
  MOD_RES (1)..(1): (R)-2-allylpyrrolidine-2-carboxylic acid
  MOD_RES (3)..(3): (S)-2-amino-4,4-dimethylpentanoic acid
  MOD_RES (4)..(4): 2-amino-2-(pent-4-en-1-yl)hept-6-enoic acid
  MOD_RES (11)..(11): (S)-3-amino-1-((pent-4-en-1-yloxy)carbonyl)pyrrolidine-3- carboxylic acid
  MOD_RES (12)..(12): (S)-2-amino-3-(thiophen-3-yl)propanoic acid
  MOD_RES (13)..(13): (S)-2-amino-3-(benzo[b]thiophen-3-yl)propanoic acid
  C-term (2R,3R)-2-aminobutane-1,3-diol
XDXXDDAAFLXXX

SEQ ID NO: 972 - protein, 13 aa, Artificial Sequence
  Description of Artificial Sequence: Synthetic peptide
  N-term Acetic Acid
  MOD_RES (1)..(1): (R)-2-allylpyrrolidine-2-carboxylic acid
  MOD_RES (3)..(3): (S)-2-amino-4,4-dimethylpentanoic acid
  MOD_RES (4)..(4): 2-amino-2-(pent-4-en-1-yl)hept-6-enoic acid
  MOD_RES (11)..(11): (S)-3-amino-1-((pent-4-en-1-yloxy)carbonyl)pyrrolidine-3- carboxylic acid
  MOD_RES (12)..(12): (S)-2-amino-3-(thiophen-3-yl)propanoic acid
  MOD_RES (13)..(13): (S)-2-amino-3-(benzo[b]thiophen-3-yl)propanoic acid
  C-term (2R,3R)-2-aminobutane-1,3-diol
XDXXDDAAFFXXX

SEQ ID NO: 973 - protein, 13 aa, Artificial Sequence
  Description of Artificial Sequence: Synthetic peptide
  N-term Acetic Acid
  MOD_RES (1)..(1): (R)-2-allylpyrrolidine-2-carboxylic acid
  MOD_RES (3)..(3): (S)-2-amino-4,4-dimethylpentanoic acid
  MOD_RES (4)..(4): 2-amino-2-(pent-4-en-1-yl)hept-6-enoic acid
  MOD_RES (11)..(11): (S)-3-amino-1-((pent-4-en-1-yloxy)carbonyl)pyrrolidine-3- carboxylic acid
  MOD_RES (12)..(12): (S)-2-amino-3-(thiophen-3-yl)propanoic acid
  MOD_RES (13)..(13): (S)-2-amino-3-(benzo[b]thiophen-3-yl)propanoic acid
  C-term (2R,3R)-2-aminobutane-1,3-diol
XNXXDDAAFLXXX

SEQ ID NO: 974 - protein, 13 aa, Artificial Sequence
  Description of Artificial Sequence: Synthetic peptide
  N-term Acetic Acid
  MOD_RES (1)..(1): (R)-2-allylpyrrolidine-2-carboxylic acid
  MOD_RES (3)..(3): (S)-2-amino-4,4-dimethylpentanoic acid
  MOD_RES (4)..(4): 2-amino-2-(pent-4-en-1-yl)hept-6-enoic acid
  MOD_RES (10)..(10): L-homoserine
  MOD_RES (11)..(11): (S)-3-amino-1-((pent-4-en-1-yloxy)carbonyl)pyrrolidine-3- carboxylic acid
  MOD_RES (12)..(12): (S)-2-amino-3-(thiophen-3-yl)propanoic acid
  MOD_RES (13)..(13): (S)-2-amino-3-(benzo[b]thiophen-3-yl)propanoic acid
  C-term (2R,3R)-2-aminobutane-1,3-diol
XDXXDDAAFSXXX

SEQ ID NO: 975 - protein, 13 aa, Artificial Sequence
  Description of Artificial Sequence: Synthetic peptide
  N-term Acetic Acid
  MOD_RES (1)..(1): (R)-2-allylpyrrolidine-2-carboxylic acid
  MOD_RES (3)..(3): (S)-2-amino-4,4-dimethylpentanoic acid
  MOD_RES (4)..(4): 2-amino-2-(pent-4-en-1-yl)hept-6-enoic acid
  MOD_RES (11)..(11): (S)-3-amino-1-((pent-4-en-1-yloxy)carbonyl)pyrrolidine-3- carboxylic acid
  MOD_RES (12)..(12): (S)-2-amino-3-(thiophen-3-yl)propanoic acid
  MOD_RES (13)..(13): (S)-2-amino-3-(benzo[b]thiophen-3-yl)propanoic acid
  C-term (2R,3R)-2-aminobutane-1,3-diol
XDXXDDAAFTXXX

SEQ ID NO: 976 - protein, 13 aa, Artificial Sequence
  Description of Artificial Sequence: Synthetic peptide
  N-term Acetic Acid
  MOD_RES (1)..(1): (R)-2-allylpyrrolidine-2-carboxylic acid
  MOD_RES (3)..(3): (S)-2-amino-3-cyclohexylpropanoic acid
  MOD_RES (4)..(4): 2-amino-2-(pent-4-en-1-yl)hept-6-enoic acid
  MOD_RES (11)..(11): (S)-3-amino-1-((pent-4-en-1-yloxy)carbonyl)pyrrolidine-3- carboxylic acid
  MOD_RES (12)..(12): (S)-2-amino-3-(2-chlorophenyl)propanoic acid
  MOD_RES (13)..(13): (S)-2-amino-3-(benzo[b]thiophen-3-yl)propanoic acid
  C-term (2R,3R)-2-aminobutane-1,3-diol
XDXXDDAAFLXFX

SEQ ID NO: 977 - protein, 13 aa, Artificial Sequence
  Description of Artificial Sequence: Synthetic peptide
  N-term Acetic Acid
  MOD_RES (1)..(1): (R)-2-allylpyrrolidine-2-carboxylic acid
  MOD_RES (3)..(3): (S)-2-amino-4,4-dimethylpentanoic acid
  MOD_RES (4)..(4): 2-amino-2-(pent-4-en-1-yl)hept-6-enoic acid
  MOD_RES (11)..(11): (S)-2-amino-2-methyldec-9-enoic acid
  MOD_RES (12)..(12): (S)-2-amino-3-(2-chlorophenyl)propanoic acid
  MOD_RES (13)..(13): (S)-2-amino-3-(benzo[b]thiophen-3-yl)propanoic acid
  C-term (2R,3R)-2-aminobutane-1,3-diol
XDXXDDAAFTXFX

SEQ ID NO: 978 - protein, 13 aa, Artificial Sequence
  Description of Artificial Sequence: Synthetic peptide
  N-term Acetic Acid
  MOD_RES (1)..(1): (R)-2-allylpyrrolidine-2-carboxylic acid
  MOD_RES (3)..(3): (S)-2-amino-4,4-dimethylpentanoic acid
  MOD_RES (4)..(4): 2-amino-2-(pent-4-en-1-yl)hept-6-enoic acid
  MOD_RES (11)..(11): (S)-3-amino-1-((pent-4-en-1-yloxy)carbonyl)pyrrolidine-3- carboxylic acid
  MOD_RES (12)..(12): (S)-2-amino-3-(2-chlorophenyl)propanoic acid
  MOD_RES (13)..(13): (S)-2-amino-3-(benzo[b]thiophen-3-yl)propanoic acid
  C-term (2R,3R)-2-aminobutane-1,3-diol
XDXXDTAAFTXFX

SEQ ID NO: 979 - protein, 13 aa, Artificial Sequence
  Description of Artificial Sequence: Synthetic peptide
  N-term Acetic Acid
  MOD_RES (1)..(1): (R)-2-allylpyrrolidine-2-carboxylic acid
  MOD_RES (3)..(3): (S)-2-amino-3-cyclohexylpropanoic acid
  MOD_RES (4)..(4): 2-amino-2-(pent-4-en-1-yl)hept-6-enoic acid
  MOD_RES (11)..(11): (S)-3-amino-1-((pent-4-en-1-yloxy)carbonyl)pyrrolidine-3- carboxylic acid
  MOD_RES (12)..(12): (S)-2-amino-3-(2-chlorophenyl)propanoic acid
  MOD_RES (13)..(13): (S)-2-amino-3-(benzo[b]thiophen-3-yl)propanoic acid
  C-term (2R,3R)-2-aminobutane-1,3-diol
XDXXDTAAFTXFX

SEQ ID NO: 980 - protein, 13 aa, Artificial Sequence
  Description of Artificial Sequence: Synthetic peptide
  N-term Acetic Acid
  MOD_RES (1)..(1): (R)-2-allylpyrrolidine-2-carboxylic acid
  MOD_RES (3)..(3): (S)-2-amino-4,4-dimethylpentanoic acid
  MOD_RES (4)..(4): 2-amino-2-(pent-4-en-1-yl)hept-6-enoic acid
  MOD_RES (11)..(11): (S)-3-amino-1-((pent-4-en-1-yloxy)carbonyl)pyrrolidine-3- carboxylic acid
  MOD_RES (12)..(12): (S)-2-amino-3-(2-chlorophenyl)propanoic acid
  MOD_RES (13)..(13): (S)-2-amino-3-(benzo[b]thiophen-3-yl)propanoic acid
  C-term (2R,3R)-2-aminobutane-1,3-diol
XDXXDDAAFFXFX

SEQ ID NO: 981 - protein, 13 aa, Artificial Sequence
  Description of Artificial Sequence: Synthetic peptide
  N-term Acetic Acid
  MOD_RES (1)..(1): (R)-2-allylpyrrolidine-2-carboxylic acid
  MOD_RES (3)..(3): (S)-2-amino-3-cyclohexylpropanoic acid
  MOD_RES (4)..(4): 2-amino-2-(pent-4-en-1-yl)hept-6-enoic acid
  MOD_RES (11)..(11): (S)-3-amino-1-((pent-4-en-1-yloxy)carbonyl)pyrrolidine-3- carboxylic acid
  MOD_RES (12)..(12): (S)-2-amino-3-(2-chlorophenyl)propanoic acid
  MOD_RES (13)..(13): (S)-2-amino-3-(benzo[b]thiophen-3-yl)propanoic acid
  C-term (2R,3R)-2-aminobutane-1,3-diol
XDXXDDAAFTXFX

SEQ ID NO: 982 - protein, 13 aa, Artificial Sequence
  Description of Artificial Sequence: Synthetic peptide
  N-term Acetic Acid
  MOD_RES (1)..(1): (R)-2-allylpyrrolidine-2-carboxylic acid
  MOD_RES (3)..(3): (S)-2-amino-4,4-dimethylpentanoic acid
  MOD_RES (4)..(4): 2-amino-2-(pent-4-en-1-yl)hept-6-enoic acid
  MOD_RES (7)..(7): N6-isopropyl-L-lysine
  MOD_RES (11)..(11): (S)-3-amino-1-((pent-4-en-1-yloxy)carbonyl)pyrrolidine-3- carboxylic acid
  MOD_RES (12)..(12): (S)-2-amino-3-(2-chlorophenyl)propanoic acid
  MOD_RES (13)..(13): (S)-2-amino-3-(benzo[b]thiophen-3-yl)propanoic acid
  C-term (2R,3R)-2-aminobutane-1,3-diol
XDXXDDKAFLXFX

SEQ ID NO: 983 - protein, 14 aa, Artificial Sequence
  Description of Artificial Sequence: Synthetic peptide
  N-term Acetic Acid
  MOD_RES (1)..(1): (R)-2-allylpyrrolidine-2-carboxylic acid
  MOD_RES (3)..(3): (S)-2-amino-4,4-dimethylpentanoic acid
  MOD_RES (4)..(4): 2-amino-2-(pent-4-en-1-yl)hept-6-enoic acid
  MOD_RES (11)..(11): (S)-3-amino-1-((pent-4-en-1-yloxy)carbonyl)pyrrolidine-3- carboxylic acid
  MOD_RES (12)..(12): (S)-2-amino-3-(2-carbamoylphenyl)propanoic acid
  MOD_RES (13)..(13): (S)-2-amino-3-(benzo[b]thiophen-3-yl)propanoic acid
  C-term amino
XDXXDDAAFNXFXQ

SEQ ID NO: 984 - protein, 14 aa, Artificial Sequence
  Description of Artificial Sequence: Synthetic peptide
  N-term Acetic Acid
  MOD_RES (1)..(1): (R)-2-allylpyrrolidine-2-carboxylic acid
  MOD_RES (3)..(3): (S)-2-amino-4,4-dimethylpentanoic acid
  MOD_RES (4)..(4): 2-amino-2-(pent-4-en-1-yl)hept-6-enoic acid
  MOD_RES (11)..(11): (S)-3-amino-1-((pent-4-en-1-yloxy)carbonyl)pyrrolidine-3- carboxylic acid
  MOD_RES (12)..(12): (S)-2-amino-3-(2-carbamoylphenyl)propanoic acid
  MOD_RES (13)..(13): (S)-2-amino-3-(benzo[b]thiophen-3-yl)propanoic acid
  C-term amino
XDXXDDAAFLXFXQ

SEQ ID NO: 985 - protein, 14 aa, Artificial Sequence
  Description of Artificial Sequence: Synthetic peptide
  N-term Acetic Acid
  MOD_RES (1)..(1): (R)-2-allylpyrrolidine-2-carboxylic acid
  MOD_RES (3)..(3): (S)-2-amino-4,4-dimethylpentanoic acid
  MOD_RES (4)..(4): 2-amino-2-(pent-4-en-1-yl)hept-6-enoic acid
  MOD_RES (11)..(11): (S)-3-amino-1-((pent-4-en-1-yloxy)carbonyl)pyrrolidine-3- carboxylic acid
  MOD_RES (12)..(12): (S)-2-amino-3-(2-carbamoylphenyl)propanoic acid
  MOD_RES (13)..(13): (S)-2-amino-3-(benzo[b]thiophen-3-yl)propanoic acid
  C-term amino
XDXXDDAAFFXFXQ

SEQ ID NO: 986 - protein, 14 aa, Artificial Sequence
  Description of Artificial Sequence: Synthetic peptide
  N-term Acetic Acid
  MOD_RES (1)..(1): (R)-2-allylpyrrolidine-2-carboxylic acid
  MOD_RES (3)..(3): (S)-2-amino-4,4-dimethylpentanoic acid
  MOD_RES (4)..(4): 2-amino-2-(pent-4-en-1-yl)hept-6-enoic acid
  MOD_RES (11)..(11): (S)-3-amino-1-((pent-4-en-1-yloxy)carbonyl)pyrrolidine-3- carboxylic acid
  MOD_RES (12)..(12): (S)-2-amino-3-(2-(trifluoromethyl)phenyl)propanoic acid
  MOD_RES (13)..(13): (S)-2-amino-3-(benzo[b]thiophen-3-yl)propanoic acid
  C-term amino
XDXXDDAAFNXFXQ

SEQ ID NO: 987 - protein, 14 aa, Artificial Sequence
  Description of Artificial Sequence: Synthetic peptide
  N-term Acetic Acid
  MOD_RES (1)..(1): (R)-2-allylpyrrolidine-2-carboxylic acid
  MOD_RES (3)..(3): (S)-2-amino-4,4-dimethylpentanoic acid
  MOD_RES (4)..(4): 2-amino-2-(pent-4-en-1-yl)hept-6-enoic acid
  MOD_RES (11)..(11): (S)-3-amino-1-((pent-4-en-1-yloxy)carbonyl)pyrrolidine-3- carboxylic acid
  MOD_RES (12)..(12): (S)-2-amino-3-(2-(trifluoromethyl)phenyl)propanoic acid
  MOD_RES (13)..(13): (S)-2-amino-3-(benzo[b]thiophen-3-yl)propanoic acid
  C-term amino
XDXXDDAAFLXFXQ

SEQ ID NO: 988 - protein, 14 aa, Artificial Sequence
  Description of Artificial Sequence: Synthetic peptide
  N-term Acetic Acid
  MOD_RES (1)..(1): (R)-2-allylpyrrolidine-2-carboxylic acid
  MOD_RES (3)..(3): (S)-2-amino-4,4-dimethylpentanoic acid
  MOD_RES (4)..(4): 2-amino-2-(pent-4-en-1-yl)hept-6-enoic acid
  MOD_RES (11)..(11): (S)-3-amino-1-((pent-4-en-1-yloxy)carbonyl)pyrrolidine-3- carboxylic acid
  MOD_RES (12)..(12): (S)-2-amino-3-(2-(trifluoromethyl)phenyl)propanoic acid
  MOD_RES (13)..(13): (S)-2-amino-3-(benzo[b]thiophen-3-yl)propanoic acid
  C-term amino
XDXXDDAAFFXFXQ

SEQ ID NO: 989 - protein, 14 aa, Artificial Sequence
  Description of Artificial Sequence: Synthetic peptide
  N-term Acetic Acid
  MOD_RES (1)..(1): (R)-2-allylpyrrolidine-2-carboxylic acid
  MOD_RES (3)..(3): (S)-2-amino-4,4-dimethylpentanoic acid
  MOD_RES (4)..(4): 2-amino-2-(pent-4-en-1-yl)hept-6-enoic acid
  MOD_RES (11)..(11): (S)-3-amino-1-((pent-4-en-1-yloxy)carbonyl)pyrrolidine-3- carboxylic acid
  MOD_RES (12)..(12): (S)-2-amino-3-(2-fluorophenyl)propanoic acid
  MOD_RES (13)..(13): (S)-2-amino-3-(benzo[b]thiophen-3-yl)propanoic acid
  C-term amino
XDXXDDAAFNXFXQ

SEQ ID NO: 990 - protein, 14 aa, Artificial Sequence
  Description of Artificial Sequence: Synthetic peptide
  N-term Acetic Acid
  MOD_RES (1)..(1): (R)-2-allylpyrrolidine-2-carboxylic acid
  MOD_RES (3)..(3): (S)-2-amino-4,4-dimethylpentanoic acid
  MOD_RES (4)..(4): 2-amino-2-(pent-4-en-1-yl)hept-6-enoic acid
  MOD_RES (11)..(11): (S)-3-amino-1-((pent-4-en-1-yloxy)carbonyl)pyrrolidine-3- carboxylic acid
  MOD_RES (12)..(12): (S)-2-amino-3-(2-fluorophenyl)propanoic acid
  MOD_RES (13)..(13): (S)-2-amino-3-(benzo[b]thiophen-3-yl)propanoic acid
  C-term amino
XDXXDDAAFLXFXQ

SEQ ID NO: 991 - protein, 14 aa, Artificial Sequence
  Description of Artificial Sequence: Synthetic peptide
  N-term Acetic Acid
  MOD_RES (1)..(1): (R)-2-allylpyrrolidine-2-carboxylic acid
  MOD_RES (3)..(3): (S)-2-amino-4,4-dimethylpentanoic acid
  MOD_RES (4)..(4): 2-amino-2-(pent-4-en-1-yl)hept-6-enoic acid
  MOD_RES (11)..(11): (S)-3-amino-1-((pent-4-en-1-yloxy)carbonyl)pyrrolidine-3- carboxylic acid
  MOD_RES (12)..(12): (S)-2-amino-3-(2-fluorophenyl)propanoic acid
  MOD_RES (13)..(13): (S)-2-amino-3-(benzo[b]thiophen-3-yl)propanoic acid
  C-term amino
XDXXDDAAFFXFXQ

SEQ ID NO: 992 - protein, 14 aa, Artificial Sequence
  Description of Artificial Sequence: Synthetic peptide
  N-term Acetic Acid
  MOD_RES (1)..(1): (R)-2-allylpyrrolidine-2-carboxylic acid
  MOD_RES (3)..(3): (S)-2-amino-4,4-dimethylpentanoic acid
  MOD_RES (4)..(4): 2-amino-2-(pent-4-en-1-yl)hept-6-enoic acid
  MOD_RES (11)..(11): (S)-3-amino-1-((pent-4-en-1-yloxy)carbonyl)pyrrolidine-3- carboxylic acid
  MOD_RES (12)..(12): (S)-2-amino-3-(2-bromophenyl)propanoic acid
  MOD_RES (13)..(13): (S)-2-amino-3-(benzo[b]thiophen-3-yl)propanoic acid
  C-term amino
XDXXDDAAFNXFXQ

SEQ ID NO: 993 - protein, 14 aa, Artificial Sequence
  Description of Artificial Sequence: Synthetic peptide
  MOD_RES (1)..(1): (R)-2-allylpyrrolidine-2-carboxylic acid
  MOD_RES (3)..(3): (S)-2-amino-4,4-dimethylpentanoic acid
  MOD_RES (4)..(4): 2-amino-2-(pent-4-en-1-yl)hept-6-enoic acid
  MOD_RES (11)..(11): (S)-3-amino-1-((pent-4-en-1-yloxy)carbonyl)pyrrolidine-3- carboxylic acid
  MOD_RES (12)..(12): (S)-2-amino-3-(2-bromophenyl)propanoic acid
  MOD_RES (13)..(13): (S)-2-amino-3-(benzo[b]thiophen-3-yl)propanoic acid
  C-term amino
XDXXDDAAFLXFXQ

SEQ ID NO: 994 - protein, 14 aa, Artificial Sequence
  Description of Artificial Sequence: Synthetic peptide
  MOD_RES (1)..(1): (R)-2-allylpyrrolidine-2-carboxylic acid
  MOD_RES (3)..(3): (S)-2-amino-4,4-dimethylpentanoic acid
  MOD_RES (4)..(4): 2-amino-2-(pent-4-en-1-yl)hept-6-enoic acid
  MOD_RES (11)..(11): (S)-3-amino-1-((pent-4-en-1-yloxy)carbonyl)pyrrolidine-3- carboxylic acid
  MOD_RES (12)..(12): (S)-2-amino-3-(2-bromophenyl)propanoic acid
  MOD_RES (13)..(13): (S)-2-amino-3-(benzo[b]thiophen-3-yl)propanoic acid
  C-term amino
XDXXDDAAFFXFXQ

SEQ ID NO: 995 - protein, 14 aa, Artificial Sequence
  Description of Artificial Sequence: Synthetic peptide
  MOD_RES (1)..(1): (R)-2-allylpyrrolidine-2-carboxylic acid
  MOD_RES (3)..(3): (S)-2-amino-4,4-dimethylpentanoic acid
  MOD_RES (4)..(4): 2-amino-2-(pent-4-en-1-yl)hept-6-enoic acid
  MOD_RES (11)..(11): (S)-3-amino-1-((pent-4-en-1-yloxy)carbonyl)pyrrolidine-3- carboxylic acid
  MOD_RES (12)..(12): (S)-2-amino-3-(o-tolyl)propanoic acid
  MOD_RES (13)..(13): (S)-2-amino-3-(benzo[b]thiophen-3-yl)propanoic acid
  C-term amino
XDXXDDAAFFXXXQ

SEQ ID NO: 996 - protein, 14 aa, Artificial Sequence
  Description of Artificial Sequence: Synthetic peptide
  MOD_RES (1)..(1): (R)-2-allylpyrrolidine-2-carboxylic acid
  MOD_RES (3)..(3): (S)-2-amino-4,4-dimethylpentanoic acid
  MOD_RES (4)..(4): 2-amino-2-(pent-4-en-1-yl)hept-6-enoic acid
  MOD_RES (11)..(11): (S)-3-amino-1-((pent-4-en-1-yloxy)carbonyl)pyrrolidine-3- carboxylic acid
  MOD_RES (12)..(12): (S)-2-amino-3-(2-methoxyphenyl)propanoic acid
  MOD_RES (13)..(13): (S)-2-amino-3-(benzo[b]thiophen-3-yl)propanoic acid
  C-term amino
XDXXDDAAFLXFXQ

SEQ ID NO: 997 - protein, 14 aa, Artificial Sequence
  Description of Artificial Sequence: Synthetic peptide
  MOD_RES (1)..(1): (R)-2-allylpyrrolidine-2-carboxylic acid
  MOD_RES (3)..(3): (S)-2-amino-4,4-dimethylpentanoic acid
  MOD_RES (4)..(4): 2-amino-2-(pent-4-en-1-yl)hept-6-enoic acid
  MOD_RES (11)..(11): (S)-3-amino-1-((pent-4-en-1-yloxy)carbonyl)pyrrolidine-3- carboxylic acid
  MOD_RES (12)..(12): (S)-2-amino-3-(2-methoxyphenyl)propanoic acid
  MOD_RES (13)..(13): (S)-2-amino-3-(benzo[b]thiophen-3-yl)propanoic acid
  C-term amino
XDXXDDAAFFXFXQ

SEQ ID NO: 998 - protein, 14 aa, Artificial Sequence
  Description of Artificial Sequence: Synthetic peptide
  MOD_RES (1)..(1): (R)-2-allylpyrrolidine-2-carboxylic acid
  MOD_RES (3)..(3): (S)-2-amino-4,4-dimethylpentanoic acid
  MOD_RES (4)..(4): 2-amino-2-(pent-4-en-1-yl)hept-6-enoic acid
  MOD_RES (11)..(11): (S)-3-amino-1-((pent-4-en-1-yloxy)carbonyl)pyrrolidine-3- carboxylic acid
  MOD_RES (12)..(12): (S)-2-amino-3-cyclohexylpropanoic acid
  MOD_RES (13)..(13): (S)-2-amino-3-(benzo[b]thiophen-3-yl)propanoic acid
  C-term amino
XDXXDDAAFNXXXQ

SEQ ID NO: 999 - protein, 14 aa, Artificial Sequence
  Description of Artificial Sequence: Synthetic peptide
  MOD_RES (1)..(1): (R)-2-allylpyrrolidine-2-carboxylic acid
  MOD_RES (3)..(3): (S)-2-amino-4,4-dimethylpentanoic acid
  MOD_RES (4)..(4): 2-amino-2-(pent-4-en-1-yl)hept-6-enoic acid
  MOD_RES (11)..(11): (S)-3-amino-1-((pent-4-en-1-yloxy)carbonyl)pyrrolidine-3- carboxylic acid
  MOD_RES (12)..(12): (S)-2-amino-3-cyclohexylpropanoic acid
  MOD_RES (13)..(13): (S)-2-amino-3-(benzo[b]thiophen-3-yl)propanoic acid
  C-term amino
XDXXDDAAFLXXXQ

SEQ ID NO: 1000 - protein, 14 aa, Artificial Sequence
  Description of Artificial Sequence: Synthetic peptide
  MOD_RES (1)..(1): (R)-2-allylpyrrolidine-2-carboxylic acid
  MOD_RES (3)..(3): (S)-2-amino-4,4-dimethylpentanoic acid
  MOD_RES (4)..(4): 2-amino-2-(pent-4-en-1-yl)hept-6-enoic acid
  MOD_RES (11)..(11): (S)-3-amino-1-((pent-4-en-1-yloxy)carbonyl)pyrrolidine-3- carboxylic acid
  MOD_RES (12)..(12): (S)-2-amino-3-cyclohexylpropanoic acid
  MOD_RES (13)..(13): (S)-2-amino-3-(benzo[b]thiophen-3-yl)propanoic acid
  C-term amino
XDXXDDAAFFXXXQ

SEQ ID NO: 1001 - protein, 14 aa, Artificial Sequence
  Description of Artificial Sequence: Synthetic peptide
  MOD_RES (1)..(1): (R)-2-allylpyrrolidine-2-carboxylic acid
  MOD_RES (3)..(3): (S)-2-amino-4,4-dimethylpentanoic acid
  MOD_RES (4)..(4): 2-amino-2-(pent-4-en-1-yl)hept-6-enoic acid
  MOD_RES (6)..(6): (S)-3-(2-amino-2-carboxyethyl)benzoic acid
  MOD_RES (11)..(11): (S)-3-amino-1-((pent-4-en-1-yloxy)carbonyl)pyrrolidine-3- carboxylic acid
  MOD_RES (12)..(12): (S)-2-amino-3-(2-chlorophenyl)propanoic acid
  MOD_RES (13)..(13): (S)-2-amino-3-(benzo[b]thiophen-3-yl)propanoic acid
  C-term amino
XDXXDXAAFLXFXQ

SEQ ID NO: 1002 - protein, 14 aa, Artificial Sequence
  Description of Artificial Sequence: Synthetic peptide
  MOD_RES (1)..(1): (R)-2-allylpyrrolidine-2-carboxylic acid
  MOD_RES (3)..(3): (S)-2-amino-4,4-dimethylpentanoic acid
  MOD_RES (4)..(4): 2-amino-2-(pent-4-en-1-yl)hept-6-enoic acid
  MOD_RES (6)..(6): (S)-3-(2-amino-2-carboxyethyl)benzoic acid
  MOD_RES (11)..(11): (S)-3-amino-1-((pent-4-en-1-yloxy)carbonyl)pyrrolidine-3- carboxylic acid
  MOD_RES (12)..(12): (S)-2-amino-3-(2-chlorophenyl)propanoic acid
  MOD_RES (13)..(13): (S)-2-amino-3-(benzo[b]thiophen-3-yl)propanoic acid
  C-term amino
XDXXDXAAFLXFXS

SEQ ID NO: 1003 - protein, 13 aa, Artificial Sequence
  Description of Artificial Sequence: Synthetic peptide
  MOD_RES (1)..(1): (R)-2-allylpyrrolidine-2-carboxylic acid
  MOD_RES (3)..(3): (S)-2-amino-4,4-dimethylpentanoic acid
  MOD_RES (4)..(4): 2-amino-2-(pent-4-en-1-yl)hept-6-enoic acid
  MOD_RES (6)..(6): (S)-3-(2-amino-2-carboxyethyl)benzoic acid
  MOD_RES (11)..(11): (S)-3-amino-1-((pent-4-en-1-yloxy)carbonyl)pyrrolidine-3- carboxylic acid
  MOD_RES (12)..(12): (S)-2-amino-3-(2-chlorophenyl)propanoic acid
  MOD_RES (13)..(13): (S)-2-amino-3-(benzo[b]thiophen-3-yl)propanoic acid
  C-term (2R,3R)-2-aminobutane-1,3-diol
XDXXDXAAFLXFX

SEQ ID NO: 1004 - protein, 14 aa, Artificial Sequence
  Description of Artificial Sequence: Synthetic peptide
  MOD_RES (1)..(1): (R)-2-allylpyrrolidine-2-carboxylic acid
  MOD_RES (3)..(3): (S)-2-amino-4,4-dimethylpentanoic acid
  MOD_RES (4)..(4): 2-amino-2-(pent-4-en-1-yl)hept-6-enoic acid
  MOD_RES (6)..(6): (S)-3-(2-amino-2-carboxyethyl)benzoic acid
  MOD_RES (11)..(11): (S)-3-amino-1-((pent-4-en-1-yloxy)carbonyl)pyrrolidine-3- carboxylic acid
  MOD_RES (12)..(12): (S)-2-amino-3-(2-(trifluoromethyl)phenyl)propanoic acid
  MOD_RES (13)..(13): (S)-2-amino-3-(benzo[b]thiophen-3-yl)propanoic acid
  C-term amino
XDXXDXAAFLXFXQ

SEQ ID NO: 1005 - protein, 14 aa, Artificial Sequence
  Description of Artificial Sequence: Synthetic peptide
  MOD_RES (1)..(1): (R)-2-allylpyrrolidine-2-carboxylic acid
  MOD_RES (3)..(3): (S)-2-amino-4,4-dimethylpentanoic acid
  MOD_RES (4)..(4): 2-amino-2-(pent-4-en-1-yl)hept-6-enoic acid
  MOD_RES (6)..(6): (S)-3-(2-amino-2-carboxyethyl)benzoic acid
  MOD_RES (11)..(11): (S)-3-amino-1-((pent-4-en-1-yloxy)carbonyl)pyrrolidine-3- carboxylic acid
  MOD_RES (12)..(12): (S)-2-amino-3-(2-(trifluoromethyl)phenyl)propanoic acid
  MOD_RES (13)..(13): (S)-2-amino-3-(benzo[b]thiophen-3-yl)propanoic acid
  C-term amino
XDXXDXAAFLXFXS

SEQ ID NO: 1006 - protein, 13 aa, Artificial Sequence
  Description of Artificial Sequence: Synthetic peptide
  MOD_RES (1)..(1): (R)-2-allylpyrrolidine-2-carboxylic acid
  MOD_RES (3)..(3): (S)-2-amino-4,4-dimethylpentanoic acid
  MOD_RES (4)..(4): 2-amino-2-(pent-4-en-1-yl)hept-6-enoic acid
  MOD_RES (6)..(6): (S)-3-(2-amino-2-carboxyethyl)benzoic acid
  MOD_RES (11)..(11): (S)-3-amino-1-((pent-4-en-1-yloxy)carbonyl)pyrrolidine-3- carboxylic acid
  MOD_RES (12)..(12): (S)-2-amino-3-(2-(trifluoromethyl)phenyl)propanoic acid
  MOD_RES (13)..(13): (S)-2-amino-3-(benzo[b]thiophen-3-yl)propanoic acid
  C-term (2R,3R)-2-aminobutane-1,3-diol
XDXXDXAAFLXFX

SEQ ID NO: 1007 - protein, 14 aa, Artificial Sequence
  Description of Artificial Sequence: Synthetic peptide
  MOD_RES (1)..(1): (R)-2-allylpyrrolidine-2-carboxylic acid
  MOD_RES (3)..(3): (S)-2-amino-4,4-dimethylpentanoic acid
  MOD_RES (4)..(4): 2-amino-2-(pent-4-en-1-yl)hept-6-enoic acid
  MOD_RES (6)..(6): (S)-3-(2-amino-2-carboxyethyl)benzoic acid
  MOD_RES (11)..(11): (S)-3-amino-1-((pent-4-en-1-yloxy)carbonyl)pyrrolidine-3- carboxylic acid
  MOD_RES (12)..(12): (S)-2-amino-3-(2-chlorophenyl)propanoic acid
  MOD_RES (13)..(13): (S)-2-amino-3-(benzo[b]thiophen-3-yl)propanoic acid
  C-term amino
XDXXDXAAFFXFXQ

SEQ ID NO: 1008 - protein, 14 aa, Artificial Sequence
  Description of Artificial Sequence: Synthetic peptide
  MOD_RES (1)..(1): (R)-2-allylpyrrolidine-2-carboxylic acid
  MOD_RES (3)..(3): (S)-2-amino-4,4-dimethylpentanoic acid
  MOD_RES (4)..(4): 2-amino-2-(pent-4-en-1-yl)hept-6-enoic acid
  MOD_RES (6)..(6): (S)-3-(2-amino-2-carboxyethyl)benzoic acid
  MOD_RES (11)..(11): (S)-3-amino-1-((pent-4-en-1-yloxy)carbonyl)pyrrolidine-3- carboxylic acid
  MOD_RES (12)..(12): (S)-2-amino-3-(2-chlorophenyl)propanoic acid
  MOD_RES (13)..(13): (S)-2-amino-3-(benzo[b]thiophen-3-yl)propanoic acid
  C-term amino
XDXXDXAAFFXFXS

SEQ ID NO: 1009 - protein, 13 aa, Artificial Sequence
  Description of Artificial Sequence: Synthetic peptide
  MOD_RES (1)..(1): (R)-2-allylpyrrolidine-2-carboxylic acid
  MOD_RES (3)..(3): (S)-2-amino-4,4-dimethylpentanoic acid
  MOD_RES (4)..(4): 2-amino-2-(pent-4-en-1-yl)hept-6-enoic acid
  MOD_RES (6)..(6): (S)-3-(2-amino-2-carboxyethyl)benzoic acid
  MOD_RES (11)..(11): (S)-3-amino-1-((pent-4-en-1-yloxy)carbonyl)pyrrolidine-3- carboxylic acid
  MOD_RES (12)..(12): (S)-2-amino-3-(2-chlorophenyl)propanoic acid
  MOD_RES (13)..(13): (S)-2-amino-3-(benzo[b]thiophen-3-yl)propanoic acid
  C-term (2R,3R)-2-aminobutane-1,3-diol
XDXXDXAAFFXFX

SEQ ID NO: 1010 - protein, 14 aa, Artificial Sequence
  Description of Artificial Sequence: Synthetic peptide
  MOD_RES (1)..(1): (R)-2-allylpyrrolidine-2-carboxylic acid
  MOD_RES (3)..(3): (S)-2-amino-4,4-dimethylpentanoic acid
  MOD_RES (4)..(4): 2-amino-2-(pent-4-en-1-yl)hept-6-enoic acid
  MOD_RES (6)..(6): (S)-3-(2-amino-2-carboxyethyl)benzoic acid
  MOD_RES (11)..(11): (S)-3-amino-1-((pent-4-en-1-yloxy)carbonyl)pyrrolidine-3- carboxylic acid
  MOD_RES (12)..(12): (S)-2-amino-3-(2-(trifluoromethyl)phenyl)propanoic acid
  MOD_RES (13)..(13): (S)-2-amino-3-(benzo[b]thiophen-3-yl)propanoic acid
  C-term amino
XDXXDXAAFFXFXQ

SEQ ID NO: 1011 - protein, 14 aa, Artificial Sequence
  Description of Artificial Sequence: Synthetic peptide
  MOD_RES (1)..(1): (R)-2-allylpyrrolidine-2-carboxylic acid
  MOD_RES (3)..(3): (S)-2-amino-4,4-dimethylpentanoic acid
  MOD_RES (4)..(4): 2-amino-2-(pent-4-en-1-yl)hept-6-enoic acid
  MOD_RES (6)..(6): (S)-3-(2-amino-2-carboxyethyl)benzoic acid
  MOD_RES (11)..(11): (S)-3-amino-1-((pent-4-en-1-yloxy)carbonyl)pyrrolidine-3- carboxylic acid
  MOD_RES (12)..(12): (S)-2-amino-3-(2-(trifluoromethyl)phenyl)propanoic acid
  MOD_RES (13)..(13): (S)-2-amino-3-(benzo[b]thiophen-3-yl)propanoic acid
  C-term amino
XDXXDXAAFFXFXS

SEQ ID NO: 1012 - protein, 13 aa, Artificial Sequence
  Description of Artificial Sequence: Synthetic peptide
  N-term Acetic Acid
  MOD_RES (1)..(1): (R)-2-allylpyrrolidine-2-carboxylic acid
  MOD_RES (3)..(3): (S)-2-amino-4,4-dimethylpentanoic acid
  MOD_RES (4)..(4): 2-amino-2-(pent-4-en-1-yl)hept-6-enoic acid
  MOD_RES (6)..(6): (S)-3-(2-amino-2-carboxyethyl)benzoic acid
  MOD_RES (11)..(11): (S)-3-amino-1-((pent-4-en-1-yloxy)carbonyl)pyrrolidine-3- carboxylic acid
  MOD_RES (12)..(12): (S)-2-amino-3-(2-(trifluoromethyl)phenyl)propanoic acid
  MOD_RES (13)..(13): (S)-2-amino-3-(benzo[b]thiophen-3-yl)propanoic acid
  C-term (2R,3R)-2-aminobutane-1,3-diol
XDXXDXAAFFXFX

SEQ ID NO: 1013 - protein, 14 aa, Artificial Sequence
  Description of Artificial Sequence: Synthetic peptide
  MOD_RES (1)..(1): (R)-2-allylpyrrolidine-2-carboxylic acid
  MOD_RES (3)..(3): (S)-2-amino-4,4-dimethylpentanoic acid
  MOD_RES (4)..(4): 2-amino-2-(pent-4-en-1-yl)hept-6-enoic acid
  MOD_RES (11)..(11): (S)-3-amino-1-((pent-4-en-1-yloxy)carbonyl)pyrrolidine-3- carboxylic acid
  MOD_RES (12)..(12): (S)-2-amino-3-(thiophen-2-yl)propanoic acid
  MOD_RES (13)..(13): (S)-2-amino-3-(benzo[b]thiophen-3-yl)propanoic acid
  C-term amino
XDXXDDAAFLXXXQ

SEQ ID NO: 1014 - protein, 14 aa, Artificial Sequence
  Description of Artificial Sequence: Synthetic peptide
  MOD_RES (1)..(1): (R)-2-allylpyrrolidine-2-carboxylic acid
  MOD_RES (3)..(3): (S)-2-amino-4,4-dimethylpentanoic acid
  MOD_RES (4)..(4): 2-amino-2-(pent-4-en-1-yl)hept-6-enoic acid
  MOD_RES (11)..(11): (S)-3-amino-1-((pent-4-en-1-yloxy)carbonyl)pyrrolidine-3- carboxylic acid
  MOD_RES (12)..(12): (S)-2-amino-3-(thiophen-2-yl)propanoic acid
  MOD_RES (13)..(13): (S)-2-amino-3-(benzo[b]thiophen-3-yl)propanoic acid
  C-term amino
XDXXDDAAFFXXXQ

SEQ ID NO: 1015 - protein, 14 aa, Artificial Sequence
  Description of Artificial Sequence: Synthetic peptide
  MOD_RES (1)..(1): (R)-2-allylpyrrolidine-2-carboxylic acid
  MOD_RES (3)..(3): (S)-2-amino-4,4-dimethylpentanoic acid
  MOD_RES (4)..(4): 2-amino-2-(pent-4-en-1-yl)hept-6-enoic acid
  MOD_RES (11)..(11): (S)-3-amino-1-((pent-4-en-1-yloxy)carbonyl)pyrrolidine-3- carboxylic acid
  MOD_RES (12)..(12): D-phenylalanine
  MOD_RES (13)..(13): (S)-2-amino-3-(benzo[b]thiophen-3-yl)propanoic acid
  C-term amino
XDXXDDAAFNXFXQ

SEQ ID NO: 1016 - protein, 14 aa, Artificial Sequence
  Description of Artificial Sequence: Synthetic peptide
  MOD_RES (1)..(1): (R)-2-allylpyrrolidine-2-carboxylic acid
  MOD_RES (3)..(3): (S)-2-amino-4,4-dimethylpentanoic acid
  MOD_RES (4)..(4): 2-amino-2-(pent-4-en-1-yl)hept-6-enoic acid
  MOD_RES (11)..(11): (S)-3-amino-1-((pent-4-en-1-yloxy)carbonyl)pyrrolidine-3- carboxylic acid
  MOD_RES (12)..(12): D-phenylalanine
  MOD_RES (13)..(13): (S)-2-amino-3-(benzo[b]thiophen-3-yl)propanoic acid
  C-term amino
XDXXDDAAFLXFXQ

SEQ ID NO: 1017 - protein, 14 aa, Artificial Sequence
  Description of Artificial Sequence: Synthetic peptide
  MOD_RES (1)..(1): (R)-2-allylpyrrolidine-2-carboxylic acid
  MOD_RES (3)..(3): (S)-2-amino-4,4-dimethylpentanoic acid
  MOD_RES (4)..(4): 2-amino-2-(pent-4-en-1-yl)hept-6-enoic acid
  MOD_RES (11)..(11): (S)-3-amino-1-((pent-4-en-1-yloxy)carbonyl)pyrrolidine-3- carboxylic acid
  MOD_RES (12)..(12): D-phenylalanine
  MOD_RES (13)..(13): (S)-2-amino-3-(benzo[b]thiophen-3-yl)propanoic acid
  C-term amino
XDXXDDAAFFXFXQ

SEQ ID NO: 1018 - protein, 14 aa, Artificial Sequence
  Description of Artificial Sequence: Synthetic peptide
  MOD_RES (1)..(1): (R)-2-allylpyrrolidine-2-carboxylic acid
  MOD_RES (3)..(3): (S)-2-amino-4,4-dimethylpentanoic acid
  MOD_RES (4)..(4): 2-amino-2-(pent-4-en-1-yl)hept-6-enoic acid
  MOD_RES (11)..(11): (S)-3-amino-1-((pent-4-en-1-yloxy)carbonyl)pyrrolidine-3- carboxylic acid
  MOD_RES (12)..(12): (S)-2-amino-4-phenylbutanoic acid
  MOD_RES (13)..(13): (S)-2-amino-3-(benzo[b]thiophen-3-yl)propanoic acid
  C-term amino
XDXXDDAAFNXXXQ

SEQ ID NO: 1019 - protein, 14 aa, Artificial Sequence
  Description of Artificial Sequence: Synthetic peptide
  MOD_RES (1)..(1): (R)-2-allylpyrrolidine-2-carboxylic acid
  MOD_RES (3)..(3): (S)-2-amino-4,4-dimethylpentanoic acid
  MOD_RES (4)..(4): 2-amino-2-(pent-4-en-1-yl)hept-6-enoic acid
  MOD_RES (11)..(11): (S)-3-amino-1-((pent-4-en-1-yloxy)carbonyl)pyrrolidine-3- carboxylic acid
  MOD_RES (12)..(12): (S)-2-amino-4-phenylbutanoic acid
  MOD_RES (13)..(13): (S)-2-amino-3-(benzo[b]thiophen-3-yl)propanoic acid
  C-term amino
XDXXDDAAFLXXXQ

SEQ ID NO: 1020 - protein, 14 aa, Artificial Sequence
  Description of Artificial Sequence: Synthetic peptide
  MOD_RES (1)..(1): (R)-2-allylpyrrolidine-2-carboxylic acid
  MOD_RES (3)..(3): (S)-2-amino-4,4-dimethylpentanoic acid
  MOD_RES (4)..(4): 2-amino-2-(pent-4-en-1-yl)hept-6-enoic acid
  MOD_RES (11)..(11): (S)-3-amino-1-((pent-4-en-1-yloxy)carbonyl)pyrrolidine-3- carboxylic acid
  MOD_RES (12)..(12): (S)-2-amino-4-phenylbutanoic acid
  MOD_RES (13)..(13): (S)-2-amino-3-(benzo[b]thiophen-3-yl)propanoic acid
  C-term amino
XDXXDDAAFFXXXQ

SEQ ID NO: 1021 - protein, 14 aa, Artificial Sequence
  Description of Artificial Sequence: Synthetic peptide
  MOD_RES (1)..(1): (R)-2-allylpyrrolidine-2-carboxylic acid
  MOD_RES (3)..(3): (S)-2-amino-4,4-dimethylpentanoic acid
  MOD_RES (4)..(4): 2-amino-2-(pent-4-en-1-yl)hept-6-enoic acid
  MOD_RES (11)..(11): (S)-3-amino-1-((pent-4-en-1-yloxy)carbonyl)pyrrolidine-3- carboxylic acid
  MOD_RES (12)..(12): (S)-2-amino-3-cyclopentylpropanoic acid
  MOD_RES (13)..(13): (S)-2-amino-3-(benzo[b]thiophen-3-yl)propanoic acid
  C-term amino
XDXXDDAAFNXXXQ

SEQ ID NO: 1022 - protein, 14 aa, Artificial Sequence
  Description of Artificial Sequence: Synthetic peptide
  MOD_RES (1)..(1): (R)-2-allylpyrrolidine-2-carboxylic acid
  MOD_RES (3)..(3): (S)-2-amino-4,4-dimethylpentanoic acid
  MOD_RES (4)..(4): 2-amino-2-(pent-4-en-1-yl)hept-6-enoic acid
  MOD_RES (11)..(11): (S)-3-amino-1-((pent-4-en-1-yloxy)carbonyl)pyrrolidine-3- carboxylic acid
  MOD_RES (12)..(12): (S)-2-amino-3-cyclopentylpropanoic acid
  MOD_RES (13)..(13): (S)-2-amino-3-(benzo[b]thiophen-3-yl)propanoic acid
  C-term amino
XDXXDDAAFLXXXQ

SEQ ID NO: 1023 - protein, 14 aa, Artificial Sequence
  Description of Artificial Sequence: Synthetic peptide
  N-term 4-(dimethylamino)butanoic acid
  MOD_RES (1)..(1): (R)-2-allylpyrrolidine-2-carboxylic acid
  MOD_RES (3)..(3): (S)-2-amino-4,4-dimethylpentanoic acid
  MOD_RES (4)..(4): 2-amino-2-(pent-4-en-1-yl)hept-6-enoic acid
  MOD_RES (11)..(11): (S)-3-amino-1-((pent-4-en-1-yloxy)carbonyl)pyrrolidine-3- carboxylic acid
  MOD_RES (13)..(13): (S)-2-amino-3-(benzo[b]thiophen-3-yl)propanoic acid
  C-term amino
XDXXDDAAFSXFXS

SEQ ID NO: 1024 - protein, 14 aa, Artificial Sequence
  Description of Artificial Sequence: Synthetic peptide
  N-term octanoic acid
  MOD_RES (1)..(1): (R)-2-allylpyrrolidine-2-carboxylic acid
  MOD_RES (3)..(3): (S)-2-amino-4,4-dimethylpentanoic acid
  MOD_RES (4)..(4): 2-amino-2-(pent-4-en-1-yl)hept-6-enoic acid
  MOD_RES (11)..(11): (S)-3-amino-1-((pent-4-en-1-yloxy)carbonyl)pyrrolidine-3- carboxylic acid
  MOD_RES (13)..(13): (S)-2-amino-3-(benzo[b]thiophen-3-yl)propanoic acid
  C-term amino
XDXXDDAAFSXFXS

SEQ ID NO: 1025 - protein, 14 aa, Artificial Sequence
  Description of Artificial Sequence: Synthetic peptide
  MOD_RES (1)..(1): (R)-2-allylpyrrolidine-2-carboxylic acid
  MOD_RES (3)..(3): (S)-2-amino-4,4-dimethylpentanoic acid
  MOD_RES (4)..(4): 2-amino-2-(pent-4-en-1-yl)hept-6-enoic acid
  MOD_RES (11)..(11): (S)-3-amino-1-((pent-4-en-1-yloxy)carbonyl)pyrrolidine-3- carboxylic acid
  MOD_RES (13)..(13): (S)-2-amino-3-(benzo[b]thiophen-3-yl)propanoic acid
  C-term amino
XDXXDDAAFSXFXS

SEQ ID NO: 1026 - protein, 14 aa, Artificial Sequence
  Description of Artificial Sequence: Synthetic peptide
  N-term 4-(dimethylamino)butanoic acid
  MOD_RES (1)..(1): (R)-2-allylpyrrolidine-2-carboxylic acid
  MOD_RES (3)..(3): (S)-2-amino-4,4-dimethylpentanoic acid
  MOD_RES (4)..(4): 2-amino-2-(pent-4-en-1-yl)hept-6-enoic acid
  MOD_RES (11)..(11): (S)-3-amino-1-((pent-4-en-1-yloxy)carbonyl)pyrrolidine-3- carboxylic acid
  MOD_RES (13)..(13): (S)-2-amino-3-(benzo[b]thiophen-3-yl)propanoic acid
  C-term amino
XDXXDDAAFLXFXQ

SEQ ID NO: 1027 - protein, 14 aa, Artificial Sequence
  Description of Artificial Sequence: Synthetic peptide
  MOD_RES (1)..(1): (R)-2-allylpyrrolidine-2-carboxylic acid
  MOD_RES (3)..(3): (S)-2-amino-4,4-dimethylpentanoic acid
  MOD_RES (4)..(4): 2-amino-2-(pent-4-en-1-yl)hept-6-enoic acid
  MOD_RES (11)..(11): (S)-3-amino-1-((pent-4-en-1-yloxy)carbonyl)pyrrolidine-3- carboxylic acid
  MOD_RES (13)..(13): (S)-2-amino-3-(benzo[b]thiophen-3-yl)propanoic acid
  C-term amino
XDXXDDAAFLXFXQ

SEQ ID NO: 1028 - protein, 14 aa, Artificial Sequence
  Description of Artificial Sequence: Synthetic peptide
  N-term Acetic Acid
  MOD_RES (1)..(1): (R)-2-allylpyrrolidine-2-carboxylic acid
  MOD_RES (3)..(3): (S)-2-amino-4,4-dimethylpentanoic acid
  MOD_RES (4)..(4): 2-amino-2-(pent-4-en-1-yl)hept-6-enoic acid
  MOD_RES (10)..(10): (S)-2-amino-3-(2-(trifluoromethyl)phenyl)propanoic acid
  MOD_RES (11)..(11): (S)-3-amino-1-((pent-4-en-1-yloxy)carbonyl)pyrrolidine-3- carboxylic acid
  MOD_RES (12)..(12): (S)-2-amino-3-(thiophen-3-yl)propanoic acid
  MOD_RES (13)..(13): (S)-2-amino-3-(benzo[b]thiophen-3-yl)propanoic acid
  C-term amino
XDXXDDAAFFXXXQ

SEQ ID NO: 1029 - protein, 14 aa, Artificial Sequence
  Description of Artificial Sequence: Synthetic peptide
  N-term Acetic Acid
  MOD_RES (1)..(1): (R)-2-allylpyrrolidine-2-carboxylic acid
  MOD_RES (3)..(3): (S)-2-amino-4,4-dimethylpentanoic acid
  MOD_RES (4)..(4): 2-amino-2-(pent-4-en-1-yl)hept-6-enoic acid
  MOD_RES (10)..(10): (S)-2-amino-3-(3-(trifluoromethyl)phenyl)propanoic acid
  MOD_RES (11)..(11): (S)-3-amino-1-((pent-4-en-1-yloxy)carbonyl)pyrrolidine-3- carboxylic acid
  MOD_RES (12)..(12): (S)-2-amino-3-(thiophen-3-yl)propanoic acid
  MOD_RES (13)..(13): (S)-2-amino-3-(benzo[b]thiophen-3-yl)propanoic acid
  C-term amino
XDXXDDAAFFXXXQ

SEQ ID NO: 1030 - protein, 14 aa, Artificial Sequence
  Description of Artificial Sequence: Synthetic peptide
  N-term Acetic Acid
  MOD_RES (1)..(1): (R)-2-allylpyrrolidine-2-carboxylic acid
  MOD_RES (3)..(3): (S)-2-amino-4,4-dimethylpentanoic acid
  MOD_RES (4)..(4): 2-amino-2-(pent-4-en-1-yl)hept-6-enoic acid
  MOD_RES (10)..(10): (S)-2-amino-3-(4-(trifluoromethyl)phenyl)propanoic acid
  MOD_RES (11)..(11): (S)-3-amino-1-((pent-4-en-1-yloxy)carbonyl)pyrrolidine-3- carboxylic acid
  MOD_RES (12)..(12): (S)-2-amino-3-(thiophen-3-yl)propanoic acid
  MOD_RES (13)..(13): (S)-2-amino-3-(benzo[b]thiophen-3-yl)propanoic acid
  C-term amino
XDXXDDAAFFXXXQ

SEQ ID NO: 1031 - protein, 14 aa, Artificial Sequence
  Description of Artificial Sequence: Synthetic peptide
  N-term Acetic Acid
  MOD_RES (1)..(1): (R)-2-allylpyrrolidine-2-carboxylic acid
  MOD_RES (3)..(3): (S)-2-amino-4,4-dimethylpentanoic acid
  MOD_RES (4)..(4): 2-amino-2-(pent-4-en-1-yl)hept-6-enoic acid
  MOD_RES (11)..(11): (S)-3-amino-1-((pent-4-en-1-yloxy)carbonyl)pyrrolidine-3- carboxylic acid
  MOD_RES (12)..(12): (S)-2-amino-3-(2-chlorophenyl)propanoic acid
  MOD_RES (13)..(13): (S)-2-amino-3-(benzo[b]thiophen-3-yl)propanoic acid
  C-term amino
XDXXDDAAFFXFXQ

SEQ ID NO: 1032 - protein, 14 aa, Artificial Sequence
  Description of Artificial Sequence: Synthetic peptide
  N-term Acetic Acid
  MOD_RES (1)..(1): (R)-2-allylpyrrolidine-2-carboxylic acid
  MOD_RES (3)..(3): (S)-2-amino-4,4-dimethylpentanoic acid
  MOD_RES (4)..(4): 2-amino-2-(pent-4-en-1-yl)hept-6-enoic acid
  MOD_RES (10)..(10): (S)-2-amino-3-(2-(trifluoromethyl)phenyl)propanoic acid
  MOD_RES (11)..(11): (S)-3-amino-1-((pent-4-en-1-yloxy)carbonyl)pyrrolidine-3- carboxylic acid
  MOD_RES (12)..(12): (S)-2-amino-3-(2-chlorophenyl)propanoic acid
  MOD_RES (13)..(13): (S)-2-amino-3-(benzo[b]thiophen-3-yl)propanoic acid
  C-term amino
XDXXDDAAFFXFXQ

SEQ ID NO: 1033 - protein, 14 aa, Artificial Sequence
  Description of Artificial Sequence: Synthetic peptide
  N-term Acetic Acid
  MOD_RES (1)..(1): (R)-2-allylpyrrolidine-2-carboxylic acid
  MOD_RES (3)..(3): (S)-2-amino-4,4-dimethylpentanoic acid
  MOD_RES (4)..(4): 2-amino-2-(pent-4-en-1-yl)hept-6-enoic acid
  MOD_RES (10)..(10): (S)-2-amino-3-(3-(trifluoromethyl)phenyl)propanoic acid
  MOD_RES (11)..(11): (S)-3-amino-1-((pent-4-en-1-yloxy)carbonyl)pyrrolidine-3- carboxylic acid
  MOD_RES (12)..(12): (S)-2-amino-3-(2-chlorophenyl)propanoic acid
  MOD_RES (13)..(13): (S)-2-amino-3-(benzo[b]thiophen-3-yl)propanoic acid
  C-term amino
XDXXDDAAFFXFXQ

SEQ ID NO: 1034 - protein, 14 aa, Artificial Sequence
  Description of Artificial Sequence: Synthetic peptide
  N-term Acetic Acid
  MOD_RES (1)..(1): (R)-2-allylpyrrolidine-2-carboxylic acid
  MOD_RES (3)..(3): (S)-2-amino-4,4-dimethylpentanoic acid
  MOD_RES (4)..(4): 2-amino-2-(pent-4-en-1-yl)hept-6-enoic acid
  MOD_RES (10)..(10): (S)-2-amino-3-(4-(trifluoromethyl)phenyl)propanoic acid
  MOD_RES (11)..(11): (S)-3-amino-1-((pent-4-en-1-yloxy)carbonyl)pyrrolidine-3- carboxylic acid
  MOD_RES (12)..(12): (S)-2-amino-3-(2-chlorophenyl)propanoic acid
  MOD_RES (13)..(13): (S)-2-amino-3-(benzo[b]thiophen-3-yl)propanoic acid
  C-term amino
XDXXDDAAFFXFXQ

SEQ ID NO: 1035 - protein, 13 aa, Artificial Sequence
  Description of Artificial Sequence: Synthetic peptide
  N-term Acetic Acid
  MOD_RES (1)..(1): (R)-2-allylpyrrolidine-2-carboxylic acid
  MOD_RES (3)..(3): (S)-2-amino-4,4-dimethylpentanoic acid
  MOD_RES (4)..(4): 2-amino-2-(pent-4-en-1-yl)hept-6-enoic acid
  MOD_RES (10)..(10): (S)-2-amino-3-(2-(trifluoromethyl)phenyl)propanoic acid
  MOD_RES (11)..(11): (S)-3-amino-1-((pent-4-en-1-yloxy)carbonyl)pyrrolidine-3- carboxylic acid
  MOD_RES (12)..(12): (S)-2-amino-3-(thiophen-3-yl)propanoic acid
  MOD_RES (13)..(13): (S)-2-amino-3-(benzo[b]thiophen-3-yl)propanoic acid
  C-term (2R,3R)-2-aminobutane-1,3-diol
XDXXDDAAFFXXX

SEQ ID NO: 1036 - protein, 13 aa, Artificial Sequence
  Description of Artificial Sequence: Synthetic peptide
  N-term Acetic Acid
  MOD_RES (1)..(1): (R)-2-allylpyrrolidine-2-carboxylic acid
  MOD_RES (3)..(3): (S)-2-amino-4,4-dimethylpentanoic acid
  MOD_RES (4)..(4): 2-amino-2-(pent-4-en-1-yl)hept-6-enoic acid
  MOD_RES (10)..(10): (S)-2-amino-3-(3-(trifluoromethyl)phenyl)propanoic acid
  MOD_RES (11)..(11): (S)-3-amino-1-((pent-4-en-1-yloxy)carbonyl)pyrrolidine-3- carboxylic acid
  MOD_RES (12)..(12): (S)-2-amino-3-(thiophen-3-yl)propanoic acid
  MOD_RES (13)..(13): (S)-2-amino-3-(benzo[b]thiophen-3-yl)propanoic acid
  C-term (2R,3R)-2-aminobutane-1,3-diol
XDXXDDAAFFXXX

SEQ ID NO: 1037 - protein, 13 aa, Artificial Sequence
  Description of Artificial Sequence: Synthetic peptide
  N-term Acetic Acid
  MOD_RES (1)..(1): (R)-2-allylpyrrolidine-2-carboxylic acid
  MOD_RES (3)..(3): (S)-2-amino-4,4-dimethylpentanoic acid
  MOD_RES (4)..(4): 2-amino-2-(pent-4-en-1-yl)hept-6-enoic acid
  MOD_RES (10)..(10): (S)-2-amino-3-(4-(trifluoromethyl)phenyl)propanoic acid
  MOD_RES (11)..(11): (S)-3-amino-1-((pent-4-en-1-yloxy)carbonyl)pyrrolidine-3- carboxylic acid
  MOD_RES (12)..(12): (S)-2-amino-3-(thiophen-3-yl)propanoic acid
  MOD_RES (13)..(13): (S)-2-amino-3-(benzo[b]thiophen-3-yl)propanoic acid
  C-term (2R,3R)-2-aminobutane-1,3-diol
XDXXDDAAFFXXX

SEQ ID NO: 1038 - protein, 14 aa, Artificial Sequence
  Description of Artificial Sequence: Synthetic peptide
  MOD_RES (1)..(1): (R)-2-allylpyrrolidine-2-carboxylic acid
  MOD_RES (3)..(3): (S)-2-amino-4,4-dimethylpentanoic acid
  MOD_RES (4)..(4): 2-amino-2-(pent-4-en-1-yl)hept-6-enoic acid
  MOD_RES (11)..(11): (S)-3-amino-1-((pent-4-en-1-yloxy)carbonyl)pyrrolidine-3- carboxylic acid
  MOD_RES (12)..(12): (S)-2-amino-3-(thiophen-3-yl)propanoic acid
  MOD_RES (13)..(13): (S)-2-amino-3-(benzo[b]thiophen-3-yl)propanoic acid
  C-term diethylamine
XDXXDDAAFNXXXQ

SEQ ID NO: 1039 - protein, 14 aa, Artificial Sequence
  Description of Artificial Sequence: Synthetic peptide
  MOD_RES (1)..(1): (R)-2-allylpyrrolidine-2-carboxylic acid
  MOD_RES (3)..(3): (S)-2-amino-4,4-dimethylpentanoic acid
  MOD_RES (4)..(4): 2-amino-2-(pent-4-en-1-yl)hept-6-enoic acid
  MOD_RES (11)..(11): (S)-3-amino-1-((pent-4-en-1-yloxy)carbonyl)pyrrolidine-3- carboxylic acid
  MOD_RES (12)..(12): (S)-2-amino-3-(thiophen-3-yl)propanoic acid
  MOD_RES (13)..(13): (S)-2-amino-3-(benzo[b]thiophen-3-yl)propanoic acid
  C-term cyclohexanamine
XDXXDDAAFNXXXQ

SEQ ID NO: 1040 - protein, 14 aa, Artificial Sequence
  Description of Artificial Sequence: Synthetic peptide
  MOD_RES (1)..(1): (R)-2-allylpyrrolidine-2-carboxylic acid
  MOD_RES (3)..(3): (S)-2-amino-4,4-dimethylpentanoic acid
  MOD_RES (4)..(4): 2-amino-2-(pent-4-en-1-yl)hept-6-enoic acid
  MOD_RES (11)..(11): (S)-3-amino-1-((pent-4-en-1-yloxy)carbonyl)pyrrolidine-3- carboxylic acid
  MOD_RES (12)..(12): (S)-2-amino-3-(thiophen-3-yl)propanoic acid
  MOD_RES (13)..(13): (S)-2-amino-3-(benzo[b]thiophen-3-yl)propanoic acid
  C-term cyclopropanamine
XDXXDDAAFNXXXQ

SEQ ID NO: 1041 - protein, 14 aa, Artificial Sequence
  Description of Artificial Sequence: Synthetic peptide
  N-term Acetic Acid
  MOD_RES (1)..(1): (R)-2-allylpyrrolidine-2-carboxylic acid
  MOD_RES (4)..(4): 2-amino-2-(pent-4-en-1-yl)hept-6-enoic acid
  MOD_RES (7)..(7): N6-isopropyl-L-lysine
  MOD_RES (11)..(11): (S)-3-amino-1-((pent-4-en-1-yloxy)carbonyl)pyrrolidine-3- carboxylic acid
  MOD_RES (13)..(13): (S)-2-amino-3-(benzo[b]thiophen-3-yl)propanoic acid
  C-term amino
XDAXNTKAFLXFXQ

SEQ ID NO: 1042 - protein, 14 aa, Artificial Sequence
  Description of Artificial Sequence: Synthetic peptide
  N-term Acetic Acid
  MOD_RES (1)..(1): (R)-2-allylpyrrolidine-2-carboxylic acid
  MOD_RES (4)..(4): 2-amino-2-(pent-4-en-1-yl)hept-6-enoic acid
  MOD_RES (7)..(7): N6-isopropyl-L-lysine
  MOD_RES (11)..(11): (S)-3-amino-1-((pent-4-en-1-yloxy)carbonyl)pyrrolidine-3- carboxylic acid
  MOD_RES (13)..(13): (S)-2-amino-3-(benzo[b]thiophen-3-yl)propanoic acid
  C-term amino
XDAXNTKAFLXFXK

SEQ ID NO: 1043 - protein, 14 aa, Artificial Sequence
  Description of Artificial Sequence: Synthetic peptide
  N-term Acetic Acid
  MOD_RES (1)..(1): (R)-2-allylpyrrolidine-2-carboxylic acid
  MOD_RES (4)..(4): 2-amino-2-(pent-4-en-1-yl)hept-6-enoic acid
  MOD_RES (7)..(7): N6-isopropyl-L-lysine
  MOD_RES (11)..(11): (S)-3-amino-1-((pent-4-en-1-yloxy)carbonyl)pyrrolidine-3- carboxylic acid
  MOD_RES (13)..(13): (S)-2-amino-3-(benzo[b]thiophen-3-yl)propanoic acid
  C-term amino
XDAXNTKAFLXFXT

SEQ ID NO: 1044 - protein, 14 aa, Artificial Sequence
  Description of Artificial Sequence: Synthetic peptide
  N-term Acetic Acid
  MOD_RES (1)..(1): (R)-2-allylpyrrolidine-2-carboxylic acid
  MOD_RES (4)..(4): 2-amino-2-(pent-4-en-1-yl)hept-6-enoic acid
  MOD_RES (7)..(7): N6-isopropyl-L-lysine
  MOD_RES (11)..(11): (S)-3-amino-1-((pent-4-en-1-yloxy)carbonyl)pyrrolidine-3- carboxylic acid
  MOD_RES (13)..(13): (S)-2-amino-3-(benzo[b]thiophen-3-yl)propanoic acid
  C-term amino
XDAXNQKAFLXFXQ

SEQ ID NO: 1045 - protein, 14 aa, Artificial Sequence
  Description of Artificial Sequence: Synthetic peptide
  N-term Acetic Acid
  MOD_RES (1)..(1): (R)-2-allylpyrrolidine-2-carboxylic acid
  MOD_RES (4)..(4): 2-amino-2-(pent-4-en-1-yl)hept-6-enoic acid
  MOD_RES (7)..(7): N6-isopropyl-L-lysine
  MOD_RES (11)..(11): (S)-3-amino-1-((pent-4-en-1-yloxy)carbonyl)pyrrolidine-3- carboxylic acid
  MOD_RES (13)..(13): (S)-2-amino-3-(benzo[b]thiophen-3-yl)propanoic acid
  C-term amino
XDAXNKKAFLXFXQ

SEQ ID NO: 1046 - protein, 14 aa, Artificial Sequence
  Description of Artificial Sequence: Synthetic peptide
  N-term Acetic Acid
  MOD_RES (1)..(1): (R)-2-allylpyrrolidine-2-carboxylic acid
  MOD_RES (4)..(4): 2-amino-2-(pent-4-en-1-yl)hept-6-enoic acid
  MOD_RES (7)..(7): N6-isopropyl-L-lysine
  MOD_RES (11)..(11): (S)-3-amino-1-((pent-4-en-1-yloxy)carbonyl)pyrrolidine-3- carboxylic acid
  MOD_RES (13)..(13): (S)-2-amino-3-(naphthalen-2-yl)propanoic acid
  C-term amino
XDAXNTKAFLXFXQ

SEQ ID NO: 1047 - protein, 14 aa, Artificial Sequence
  Description of Artificial Sequence: Synthetic peptide
  N-term Acetic Acid
  MOD_RES (1)..(1): (R)-2-allylpyrrolidine-2-carboxylic acid
  MOD_RES (4)..(4): 2-amino-2-(pent-4-en-1-yl)hept-6-enoic acid
  MOD_RES (7)..(7): N6-isopropyl-L-lysine
  MOD_RES (11)..(11): (S)-3-amino-1-((pent-4-en-1-yloxy)carbonyl)pyrrolidine-3- carboxylic acid
  MOD_RES (13)..(13): (S)-2-amino-3-(benzo[b]thiophen-3-yl)propanoic acid
  C-term amino
XNAXDTKAFLXFXQ

SEQ ID NO: 1048 - protein, 14 aa, Artificial Sequence
  Description of Artificial Sequence: Synthetic peptide
  N-term Acetic Acid
  MOD_RES (1)..(1): (R)-2-allylpyrrolidine-2-carboxylic acid
  MOD_RES (4)..(4): 2-amino-2-(pent-4-en-1-yl)hept-6-enoic acid
  MOD_RES (7)..(7): N6-isopropyl-L-lysine
  MOD_RES (11)..(11): (S)-3-amino-1-((pent-4-en-1-yloxy)carbonyl)pyrrolidine-3- carboxylic acid
  MOD_RES (13)..(13): (S)-2-amino-3-(benzo[b]thiophen-3-yl)propanoic acid
  C-term amino
XNAXDTKAFLXFXK

SEQ ID NO: 1049 - protein, 14 aa, Artificial Sequence
  Description of Artificial Sequence: Synthetic peptide
  N-term Acetic Acid
  MOD_RES (1)..(1): (R)-2-allylpyrrolidine-2-carboxylic acid
  MOD_RES (4)..(4): 2-amino-2-(pent-4-en-1-yl)hept-6-enoic acid
  MOD_RES (7)..(7): N6-isopropyl-L-lysine
  MOD_RES (11)..(11): (S)-3-amino-1-((pent-4-en-1-yloxy)carbonyl)pyrrolidine-3- carboxylic acid
  MOD_RES (13)..(13): (S)-2-amino-3-(benzo[b]thiophen-3-yl)propanoic acid
  C-term amino
XNAXDTKAFLXFXT

SEQ ID NO: 1050 - protein, 14 aa, Artificial Sequence
  Description of Artificial Sequence: Synthetic peptide
  N-term Acetic Acid
  MOD_RES (1)..(1): (R)-2-allylpyrrolidine-2-carboxylic acid
  MOD_RES (4)..(4): 2-amino-2-(pent-4-en-1-yl)hept-6-enoic acid
  MOD_RES (7)..(7): N6-isopropyl-L-lysine
  MOD_RES (11)..(11): (S)-3-amino-1-((pent-4-en-1-yloxy)carbonyl)pyrrolidine-3- carboxylic acid
  MOD_RES (13)..(13): (S)-2-amino-3-(benzo[b]thiophen-3-yl)propanoic acid
  C-term amino
XNAXDQKAFLXFXQ

SEQ ID NO: 1051 - protein, 14 aa, Artificial Sequence
  Description of Artificial Sequence: Synthetic peptide
  N-term Acetic Acid
  MOD_RES (1)..(1): (R)-2-allylpyrrolidine-2-carboxylic acid
  MOD_RES (4)..(4): 2-amino-2-(pent-4-en-1-yl)hept-6-enoic acid
  MOD_RES (7)..(7): N6-isopropyl-L-lysine
  MOD_RES (11)..(11): (S)-3-amino-1-((pent-4-en-1-yloxy)carbonyl)pyrrolidine-3- carboxylic acid
  MOD_RES (13)..(13): (S)-2-amino-3-(benzo[b]thiophen-3-yl)propanoic acid
  C-term amino
XNAXDKKAFLXFXQ

SEQ ID NO: 1052 - protein, 14 aa, Artificial Sequence
  Description of Artificial Sequence: Synthetic peptide
  N-term Acetic Acid
  MOD_RES (1)..(1): (R)-2-allylpyrrolidine-2-carboxylic acid
  MOD_RES (4)..(4): 2-amino-2-(pent-4-en-1-yl)hept-6-enoic acid
  MOD_RES (7)..(7): N6-isopropyl-L-lysine
  MOD_RES (11)..(11): (S)-3-amino-1-((pent-4-en-1-yloxy)carbonyl)pyrrolidine-3- carboxylic acid
  MOD_RES (13)..(13): (S)-2-amino-3-(naphthalen-2-yl)propanoic acid
  C-term amino
XNAXDTKAFLXFXQ

SEQ ID NO: 1053 - protein, 14 aa, Artificial Sequence
  Description of Artificial Sequence: Synthetic peptide
  N-term Acetic Acid
  MOD_RES (1)..(1): (R)-2-allylpyrrolidine-2-carboxylic acid
  MOD_RES (3)..(3): (S)-2-amino-4,4-dimethylpentanoic acid
  MOD_RES (4)..(4): 2-amino-2-(pent-4-en-1-yl)hept-6-enoic acid
  MOD_RES (10)..(10): L-homoserine
  MOD_RES (11)..(11): (S)-2-amino-2-methyldec-9-enoic acid
  MOD_RES (13)..(13): (S)-2-amino-3-(benzo[b]thiophen-3-yl)propanoic acid
  C-term amino
XDXXDDAAFSXFXQ

SEQ ID NO: 1054 - protein, 14 aa, Artificial Sequence
  Description of Artificial Sequence: Synthetic peptide
  N-term Acetic Acid
  MOD_RES (1)..(1): (R)-2-allylpyrrolidine-2-carboxylic acid
  MOD_RES (3)..(3): (S)-2-amino-4,4-dimethylpentanoic acid
  MOD_RES (4)..(4): 2-amino-2-(pent-4-en-1-yl)hept-6-enoic acid
  MOD_RES (10)..(10): L-homoserine
  MOD_RES (11)..(11): (S)-2-amino-2-methyldec-9-enoic acid
  MOD_RES (12)..(12): (S)-2-amino-3-(thiophen-3-yl)propanoic acid
  MOD_RES (13)..(13): (S)-2-amino-3-(benzo[b]thiophen-3-yl)propanoic acid
  C-term amino
XDXXDDAAFSXXXQ

SEQ ID NO: 1055 - protein, 13 aa, Artificial Sequence
  Description of Artificial Sequence: Synthetic peptide
  N-term Acetic Acid
  MOD_RES (1)..(1): (R)-2-allylpyrrolidine-2-carboxylic acid
  MOD_RES (3)..(3): (S)-2-amino-4,4-dimethylpentanoic acid
  MOD_RES (4)..(4): 2-amino-2-(pent-4-en-1-yl)hept-6-enoic acid
  MOD_RES (10)..(10): L-homoserine
  MOD_RES (11)..(11): (S)-2-amino-2-methyldec-9-enoic acid
  MOD_RES (12)..(12): (S)-2-amino-3-(thiophen-3-yl)propanoic acid
  MOD_RES (13)..(13): (S)-2-amino-3-(benzo[b]thiophen-3-yl)propanoic acid
  C-term (2R,3R)-2-aminobutane-1,3-diol
XDXXDDAAFSXXX

SEQ ID NO: 1056 - protein, 14 aa, Artificial Sequence
  Description of Artificial Sequence: Synthetic peptide
  N-term Acetic Acid
  MOD_RES (1)..(1): (R)-2-allylpyrrolidine-2-carboxylic acid
  MOD_RES (3)..(3): (S)-2-amino-4,4-dimethylpentanoic acid
  MOD_RES (4)..(4): 2-amino-2-(pent-4-en-1-yl)hept-6-enoic acid
  MOD_RES (11)..(11): (S)-2-amino-2-methyldec-9-enoic acid
  MOD_RES (12)..(12): (S)-2-amino-3-(thiophen-2-yl)propanoic acid
  MOD_RES (13)..(13): (S)-2-amino-3-(benzo[b]thiophen-3-yl)propanoic acid
  C-term amino
XDXXDDAAFNXXXQ

SEQ ID NO: 1057 - protein, 14 aa, Artificial Sequence
  Description of Artificial Sequence: Synthetic peptide
  N-term Acetic Acid
  MOD_RES (1)..(1): (R)-2-allylpyrrolidine-2-carboxylic acid
  MOD_RES (3)..(3): (S)-2-amino-4,4-dimethylpentanoic acid
  MOD_RES (4)..(4): 2-amino-2-(pent-4-en-1-yl)hept-6-enoic acid
  MOD_RES (10)..(10): L-homoserine
  MOD_RES (11)..(11): (S)-2-amino-2-methyldec-9-enoic acid
  MOD_RES (12)..(12): (S)-2-amino-3-(thiophen-2-yl)propanoic acid
  MOD_RES (13)..(13): (S)-2-amino-3-(benzo[b]thiophen-3-yl)propanoic acid
  C-term amino
XDXXDDAAFSXXXQ

SEQ ID NO: 1058 - protein, 13 aa, Artificial Sequence
  Description of Artificial Sequence: Synthetic peptide
  N-term Acetic Acid
  MOD_RES (1)..(1): (R)-2-allylpyrrolidine-2-carboxylic acid
  MOD_RES (3)..(3): (S)-2-amino-4,4-dimethylpentanoic acid
  MOD_RES (4)..(4): 2-amino-2-(pent-4-en-1-yl)hept-6-enoic acid
  MOD_RES (10)..(10): L-homoserine
  MOD_RES (11)..(11): (S)-2-amino-2-methyldec-9-enoic acid
  MOD_RES (12)..(12): (S)-2-amino-3-(thiophen-2-yl)propanoic acid
  MOD_RES (13)..(13): (S)-2-amino-3-(benzo[b]thiophen-3-yl)propanoic acid
  C-term (2R,3R)-2-aminobutane-1,3-diol
XDXXDDAAFSXXX

SEQ ID NO: 1059 - protein, 14 aa, Artificial Sequence
  Description of Artificial Sequence: Synthetic peptide
  N-term Acetic Acid
  MOD_RES (1)..(1): (R)-2-allylpyrrolidine-2-carboxylic acid
  MOD_RES (3)..(3): (S)-2-amino-4,4-dimethylpentanoic acid
  MOD_RES (4)..(4): 2-amino-2-(pent-4-en-1-yl)hept-6-enoic acid
  MOD_RES (11)..(11): (S)-2-amino-2-methyldec-9-enoic acid
  MOD_RES (12)..(12): (S)-2-amino-3-(2-chlorophenyl)propanoic acid
  MOD_RES (13)..(13): (S)-2-amino-3-(benzo[b]thiophen-3-yl)propanoic acid
  C-term amino
XDXXDDAAFNXFXQ

SEQ ID NO: 1060 - protein, 14 aa, Artificial Sequence
  Description of Artificial Sequence: Synthetic peptide
  N-term Acetic Acid
  MOD_RES (1)..(1): (R)-2-allylpyrrolidine-2-carboxylic acid
  MOD_RES (3)..(3): (S)-2-amino-4,4-dimethylpentanoic acid
  MOD_RES (4)..(4): 2-amino-2-(pent-4-en-1-yl)hept-6-enoic acid
  MOD_RES (10)..(10): L-homoserine
  MOD_RES (11)..(11): (S)-2-amino-2-methyldec-9-enoic acid
  MOD_RES (12)..(12): (S)-2-amino-3-(2-chlorophenyl)propanoic acid
  MOD_RES (13)..(13): (S)-2-amino-3-(benzo[b]thiophen-3-yl)propanoic acid
  C-term amino
XDXXDDAAFSXFXQ

SEQ ID NO: 1061 - protein, 14 aa, Artificial Sequence
  Description of Artificial Sequence: Synthetic peptide
  N-term Acetic Acid
  MOD_RES (1)..(1): (R)-2-allylpyrrolidine-2-carboxylic acid
  MOD_RES (3)..(3): (S)-2-amino-4,4-dimethylpentanoic acid
  MOD_RES (4)..(4): 2-amino-2-(pent-4-en-1-yl)hept-6-enoic acid
  MOD_RES (11)..(11): (S)-2-amino-2-methyldec-9-enoic acid
  MOD_RES (12)..(12): (S)-2-amino-3-(2-(trifluoromethyl)phenyl)propanoic acid
  MOD_RES (13)..(13): (S)-2-amino-3-(benzo[b]thiophen-3-yl)propanoic acid
  C-term amino
XDXXDDAAFNXFXQ

SEQ ID NO: 1062 - protein, 14 aa, Artificial Sequence
  Description of Artificial Sequence: Synthetic peptide
  N-term Acetic Acid
  MOD_RES (1)..(1): (R)-2-allylpyrrolidine-2-carboxylic acid
  MOD_RES (3)..(3): (S)-2-amino-4,4-dimethylpentanoic acid
  MOD_RES (4)..(4): 2-amino-2-(pent-4-en-1-yl)hept-6-enoic acid
  MOD_RES (10)..(10): L-homoserine
  MOD_RES (11)..(11): (S)-2-amino-2-methyldec-9-enoic acid
  MOD_RES (12)..(12): (S)-2-amino-3-(2-(trifluoromethyl)phenyl)propanoic acid
  MOD_RES (13)..(13): (S)-2-amino-3-(benzo[b]thiophen-3-yl)propanoic acid
  C-term amino
XDXXDDAAFSXFXQ

SEQ ID NO: 1063 - protein, 13 aa, Artificial Sequence
  Description of Artificial Sequence: Synthetic peptide
  N-term Acetic Acid
  MOD_RES (1)..(1): (R)-2-allylpyrrolidine-2-carboxylic acid
  MOD_RES (3)..(3): (S)-2-amino-4,4-dimethylpentanoic acid
  MOD_RES (4)..(4): 2-amino-2-(pent-4-en-1-yl)hept-6-enoic acid
  MOD_RES (10)..(10): L-homoserine
  MOD_RES (11)..(11): (S)-2-amino-2-methyldec-9-enoic acid
  MOD_RES (12)..(12): (S)-2-amino-3-(2-(trifluoromethyl)phenyl)propanoic acid
  MOD_RES (13)..(13): (S)-2-amino-3-(benzo[b]thiophen-3-yl)propanoic acid
  C-term (2R,3R)-2-aminobutane-1,3-diol
XDXXDDAAFSXFX

SEQ ID NO: 1064 - protein, 14 aa, Artificial Sequence
  Description of Artificial Sequence: Synthetic peptide
  N-term Acetic Acid
  MOD_RES (1)..(1): (R)-2-allylpyrrolidine-2-carboxylic acid
  MOD_RES (4)..(4): 2-amino-2-(pent-4-en-1-yl)hept-6-enoic acid
  MOD_RES (11)..(11): (S)-3-amino-1-((pent-4-en-1-yloxy)carbonyl)pyrrolidine-3- carboxylic acid
  MOD_RES (12)..(12): (S)-2-amino-3-(thiophen-3-yl)propanoic acid
  MOD_RES (13)..(13): (S)-2-amino-3-(benzo[b]thiophen-3-yl)propanoic acid
  C-term amino
XDLXDDAAFLXXXQ

SEQ ID NO: 1065 - protein, 14 aa, Artificial Sequence
  Description of Artificial Sequence: Synthetic peptide
  N-term Acetic Acid
  MOD_RES (1)..(1): (R)-2-allylpyrrolidine-2-carboxylic acid
  MOD_RES (3)..(3): (S)-2-aminohexanoic acid
  MOD_RES (4)..(4): 2-amino-2-(pent-4-en-1-yl)hept-6-enoic acid
  MOD_RES (11)..(11): (S)-3-amino-1-((pent-4-en-1-yloxy)carbonyl)pyrrolidine-3- carboxylic acid
  MOD_RES (12)..(12): (S)-2-amino-3-(thiophen-3-yl)propanoic acid
  MOD_RES (13)..(13): (S)-2-amino-3-(benzo[b]thiophen-3-yl)propanoic acid
  C-term amino
XDXXDDAAFLXXXQ

SEQ ID NO: 1066 - protein, 14 aa, Artificial Sequence
  Description of Artificial Sequence: Synthetic peptide
  N-term Acetic Acid
  MOD_RES (1)..(1): (R)-2-allylpyrrolidine-2-carboxylic acid
  MOD_RES (3)..(3): (S)-2-aminohexanoic acid
  MOD_RES (4)..(4): 2-amino-2-(pent-4-en-1-yl)hept-6-enoic acid
  MOD_RES (10)..(10): (S)-2-aminohexanoic acid
  MOD_RES (11)..(11): (S)-3-amino-1-((pent-4-en-1-yloxy)carbonyl)pyrrolidine-3- carboxylic acid
  MOD_RES (12)..(12): (S)-2-amino-3-(thiophen-3-yl)propanoic acid
  MOD_RES (13)..(13): (S)-2-amino-3-(benzo[b]thiophen-3-yl)propanoic acid
  C-term amino
XDXXDDAAFXXXXQ

SEQ ID NO: 1067 - protein, 14 aa, Artificial Sequence
  Description of Artificial Sequence: Synthetic peptide
  N-term Acetic Acid
  MOD_RES (1)..(1): (R)-2-allylpyrrolidine-2-carboxylic acid
  MOD_RES (4)..(4): 2-amino-2-(pent-4-en-1-yl)hept-6-enoic acid
  MOD_RES (11)..(11): (S)-3-amino-1-((pent-4-en-1-yloxy)carbonyl)pyrrolidine-3- carboxylic acid
  MOD_RES (13)..(13): (S)-2-amino-3-(benzo[b]thiophen-3-yl)propanoic acid
  C-term amino
XDLXDDAAFLXFXQ

SEQ ID NO: 1068 - protein, 14 aa, Artificial Sequence
  Description of Artificial Sequence: Synthetic peptide
  N-term Acetic Acid
  MOD_RES (1)..(1): (R)-2-allylpyrrolidine-2-carboxylic acid
  MOD_RES (3)..(3): (S)-2-aminohexanoic acid
  MOD_RES (4)..(4): 2-amino-2-(pent-4-en-1-yl)hept-6-enoic acid
  MOD_RES (11)..(11): (S)-3-amino-1-((pent-4-en-1-yloxy)carbonyl)pyrrolidine-3- carboxylic acid
  MOD_RES (13)..(13): (S)-2-amino-3-(benzo[b]thiophen-3-yl)propanoic acid
  C-term amino
XDXXDDAAFLXFXQ

SEQ ID NO: 1069 - protein, 14 aa, Artificial Sequence
  Description of Artificial Sequence: Synthetic peptide
  N-term Acetic Acid
  MOD_RES (1)..(1): (R)-2-allylpyrrolidine-2-carboxylic acid
  MOD_RES (4)..(4): 2-amino-2-(pent-4-en-1-yl)hept-6-enoic acid
  MOD_RES (10)..(10): (S)-2-aminohexanoic acid
  MOD_RES (11)..(11): (S)-3-amino-1-((pent-4-en-1-yloxy)carbonyl)pyrrolidine-3- carboxylic acid
  MOD_RES (13)..(13): (S)-2-amino-3-(benzo[b]thiophen-3-yl)propanoic acid
  C-term amino
XDLXDDAAFXXFXQ

SEQ ID NO: 1070 - protein, 14 aa, Artificial Sequence
  Description of Artificial Sequence: Synthetic peptide
  N-term Acetic Acid
  MOD_RES (1)..(1): (R)-2-allylpyrrolidine-2-carboxylic acid
  MOD_RES (3)..(3): (S)-2-aminohexanoic acid
  MOD_RES (4)..(4): 2-amino-2-(pent-4-en-1-yl)hept-6-enoic acid
  MOD_RES (10)..(10): (S)-2-aminohexanoic acid
  MOD_RES (11)..(11): (S)-3-amino-1-((pent-4-en-1-yloxy)carbonyl)pyrrolidine-3- carboxylic acid
  MOD_RES (13)..(13): (S)-2-amino-3-(benzo[b]thiophen-3-yl)propanoic acid
  C-term amino
XDXXDDAAFXXFXQ

SEQ ID NO: 1071 - protein, 14 aa, Artificial Sequence
  Description of Artificial Sequence: Synthetic peptide
  N-term Acetic Acid
  MOD_RES (1)..(1): (R)-2-allylpyrrolidine-2-carboxylic acid
  MOD_RES (4)..(4): 2-amino-2-(pent-4-en-1-yl)hept-6-enoic acid
  MOD_RES (6)..(6): (S)-3-(2-amino-2-carboxyethyl)benzoic acid
  MOD_RES (11)..(11): (S)-3-amino-1-((pent-4-en-1-yloxy)carbonyl)pyrrolidine-3- carboxylic acid
  MOD_RES (12)..(12): (S)-2-amino-3-(thiophen-3-yl)propanoic acid
  MOD_RES (13)..(13): (S)-2-amino-3-(benzo[b]thiophen-3-yl)propanoic acid
  C-term amino
XDLXDXAAFLXXXQ

SEQ ID NO: 1072 - protein, 14 aa, Artificial Sequence
  Description of Artificial Sequence: Synthetic peptide
  N-term Acetic Acid
  MOD_RES (1)..(1): (R)-2-allylpyrrolidine-2-carboxylic acid
  MOD_RES (4)..(4): 2-amino-2-(pent-4-en-1-yl)hept-6-enoic acid
  MOD_RES (6)..(6): (S)-3-(2-amino-2-carboxyethyl)benzoic acid
  MOD_RES (10)..(10): (S)-2-aminohexanoic acid
  MOD_RES (11)..(11): (S)-3-amino-1-((pent-4-en-1-yloxy)carbonyl)pyrrolidine-3- carboxylic acid
  MOD_RES (12)..(12): (S)-2-amino-3-(thiophen-3-yl)propanoic acid
  MOD_RES (13)..(13): (S)-2-amino-3-(benzo[b]thiophen-3-yl)propanoic acid
  C-term amino
XDLXDXAAFXXXXQ

SEQ ID NO: 1073 - protein, 14 aa, Artificial Sequence
  Description of Artificial Sequence: Synthetic peptide
  N-term Acetic Acid
  MOD_RES (1)..(1): (R)-2-allylpyrrolidine-2-carboxylic acid
  MOD_RES (3)..(3): (S)-2-aminohexanoic acid
  MOD_RES (4)..(4): 2-amino-2-(pent-4-en-1-yl)hept-6-enoic acid
  MOD_RES (6)..(6): (S)-3-(2-amino-2-carboxyethyl)benzoic acid
  MOD_RES (10)..(10): (S)-2-aminohexanoic acid
  MOD_RES (11)..(11): (S)-3-amino-1-((pent-4-en-1-yloxy)carbonyl)pyrrolidine-3- carboxylic acid
  MOD_RES (12)..(12): (S)-2-amino-3-(thiophen-3-yl)propanoic acid
  MOD_RES (13)..(13): (S)-2-amino-3-(benzo[b]thiophen-3-yl)propanoic acid
  C-term amino
XDXXDXAAFXXXXQ

SEQ ID NO: 1074 - protein, 14 aa, Artificial Sequence
  Description of Artificial Sequence: Synthetic peptide
  N-term Acetic Acid
  MOD_RES (1)..(1): (R)-2-allylpyrrolidine-2-carboxylic acid
  MOD_RES (3)..(3): (S)-2-amino-4,4-dimethylpentanoic acid
  MOD_RES (4)..(4): 2-amino-2-(pent-4-en-1-yl)hept-6-enoic acid
  MOD_RES (11)..(11): (S)-3-amino-1-((pent-4-en-1-yloxy)carbonyl)pyrrolidine-3- carboxylic acid
  MOD_RES (12)..(12): (S)-2-amino-3-(thiophen-3-yl)propanoic acid
  MOD_RES (13)..(13): (S)-2-amino-3-(benzo[b]thiophen-3-yl)propanoic acid
  C-term amino
XDXXDDAAFLXXXL

SEQ ID NO: 1075 - protein, 14 aa, Artificial Sequence
  Description of Artificial Sequence: Synthetic peptide
  N-term Acetic Acid
  MOD_RES (1)..(1): (R)-2-allylpyrrolidine-2-carboxylic acid
  MOD_RES (4)..(4): 2-amino-2-(pent-4-en-1-yl)hept-6-enoic acid
  MOD_RES (11)..(11): (S)-3-amino-1-((pent-4-en-1-yloxy)carbonyl)pyrrolidine-3- carboxylic acid
  MOD_RES (12)..(12): (S)-2-amino-3-(thiophen-3-yl)propanoic acid
  MOD_RES (13)..(13): (S)-2-amino-3-(benzo[b]thiophen-3-yl)propanoic acid
  C-term amino
XDLXDDAAFLXXXL

SEQ ID NO: 1076 - protein, 14 aa, Artificial Sequence
  Description of Artificial Sequence: Synthetic peptide
  N-term Acetic Acid
  MOD_RES (1)..(1): (R)-2-allylpyrrolidine-2-carboxylic acid
  MOD_RES (3)..(3): (S)-2-aminohexanoic acid
  MOD_RES (4)..(4): 2-amino-2-(pent-4-en-1-yl)hept-6-enoic acid
  MOD_RES (11)..(11): (S)-3-amino-1-((pent-4-en-1-yloxy)carbonyl)pyrrolidine-3- carboxylic acid
  MOD_RES (12)..(12): (S)-2-amino-3-(thiophen-3-yl)propanoic acid
  MOD_RES (13)..(13): (S)-2-amino-3-(benzo[b]thiophen-3-yl)propanoic acid
  C-term amino
XDXXDDAAFLXXXL

SEQ ID NO: 1077 - protein, 14 aa, Artificial Sequence
  Description of Artificial Sequence: Synthetic peptide
  N-term Acetic Acid
  MOD_RES (1)..(1): (R)-2-allylpyrrolidine-2-carboxylic acid
  MOD_RES (4)..(4): 2-amino-2-(pent-4-en-1-yl)hept-6-enoic acid
  MOD_RES (11)..(11): (S)-3-amino-1-((pent-4-en-1-yloxy)carbonyl)pyrrolidine-3- carboxylic acid
  MOD_RES (12)..(12): (S)-2-amino-3-(thiophen-3-yl)propanoic acid
  MOD_RES (13)..(13): (S)-2-amino-3-(benzo[b]thiophen-3-yl)propanoic acid
  C-term amino
XDNXDDAAFLXXXL

SEQ ID NO: 1078 - protein, 14 aa, Artificial Sequence
  Description of Artificial Sequence: Synthetic peptide
  N-term Acetic Acid
  MOD_RES (1)..(1): (R)-2-allylpyrrolidine-2-carboxylic acid
  MOD_RES (4)..(4): 2-amino-2-(pent-4-en-1-yl)hept-6-enoic acid
  MOD_RES (11)..(11): (S)-3-amino-1-((pent-4-en-1-yloxy)carbonyl)pyrrolidine-3- carboxylic acid
  MOD_RES (12)..(12): (S)-2-amino-3-(thiophen-3-yl)propanoic acid
  MOD_RES (13)..(13): (S)-2-amino-3-(benzo[b]thiophen-3-yl)propanoic acid
  C-term amino
XDSXDDAAFLXXXL

SEQ ID NO: 1079 - protein, 14 aa, Artificial Sequence
  Description of Artificial Sequence: Synthetic peptide
  N-term Acetic Acid
  MOD_RES (1)..(1): (R)-2-allylpyrrolidine-2-carboxylic acid
  MOD_RES (4)..(4): 2-amino-2-(pent-4-en-1-yl)hept-6-enoic acid
  MOD_RES (11)..(11): (S)-3-amino-1-((pent-4-en-1-yloxy)carbonyl)pyrrolidine-3- carboxylic acid
  MOD_RES (12)..(12): (S)-2-amino-3-(thiophen-3-yl)propanoic acid
  MOD_RES (13)..(13): (S)-2-amino-3-(benzo[b]thiophen-3-yl)propanoic acid
  C-term amino
XDTXDDAAFLXXXL

SEQ ID NO: 1080 - protein, 14 aa, Artificial Sequence
  Description of Artificial Sequence: Synthetic peptide
  N-term Acetic Acid
  MOD_RES (1)..(1): (R)-2-allylpyrrolidine-2-carboxylic acid
  MOD_RES (3)..(3): (S)-2-amino-4,4-dimethylpentanoic acid
  MOD_RES (4)..(4): 2-amino-2-(pent-4-en-1-yl)hept-6-enoic acid
  MOD_RES (11)..(11): (S)-3-amino-1-((pent-4-en-1-yloxy)carbonyl)pyrrolidine-3- carboxylic acid
  MOD_RES (12)..(12): (S)-2-amino-3-(2-chlorophenyl)propanoic acid
  MOD_RES (13)..(13): (S)-2-amino-3-(benzo[b]thiophen-3-yl)propanoic acid
  C-term amino
XDXXDDAAFLXFXL

SEQ ID NO: 1081 - protein, 14 aa, Artificial Sequence
  Description of Artificial Sequence: Synthetic peptide
  N-term Acetic Acid
  MOD_RES (1)..(1): (R)-2-allylpyrrolidine-2-carboxylic acid
  MOD_RES (4)..(4): 2-amino-2-(pent-4-en-1-yl)hept-6-enoic acid
  MOD_RES (11)..(11): (S)-3-amino-1-((pent-4-en-1-yloxy)carbonyl)pyrrolidine-3- carboxylic acid
  MOD_RES (12)..(12): (S)-2-amino-3-(2-chlorophenyl)propanoic acid
  MOD_RES (13)..(13): (S)-2-amino-3-(benzo[b]thiophen-3-yl)propanoic acid
  C-term amino
XDLXDDAAFLXFXL

SEQ ID NO: 1082 - protein, 14 aa, Artificial Sequence
  Description of Artificial Sequence: Synthetic peptide
  N-term Acetic Acid
  MOD_RES (1)..(1): (R)-2-allylpyrrolidine-2-carboxylic acid
  MOD_RES (3)..(3): (S)-2-aminohexanoic acid
  MOD_RES (4)..(4): 2-amino-2-(pent-4-en-1-yl)hept-6-enoic acid
  MOD_RES (11)..(11): (S)-3-amino-1-((pent-4-en-1-yloxy)carbonyl)pyrrolidine-3- carboxylic acid
  MOD_RES (12)..(12): (S)-2-amino-3-(2-chlorophenyl)propanoic acid
  MOD_RES (13)..(13): (S)-2-amino-3-(benzo[b]thiophen-3-yl)propanoic acid
  C-term amino
XDXXDDAAFLXFXL

SEQ ID NO: 1083 - protein, 14 aa, Artificial Sequence
  Description of Artificial Sequence: Synthetic peptide
  N-term Acetic Acid
  MOD_RES (1)..(1): (R)-2-allylpyrrolidine-2-carboxylic acid
  MOD_RES (4)..(4): 2-amino-2-(pent-4-en-1-yl)hept-6-enoic acid
  MOD_RES (11)..(11): (S)-3-amino-1-((pent-4-en-1-yloxy)carbonyl)pyrrolidine-3- carboxylic acid
  MOD_RES (12)..(12): (S)-2-amino-3-(2-chlorophenyl)propanoic acid
  MOD_RES (13)..(13): (S)-2-amino-3-(benzo[b]thiophen-3-yl)propanoic acid
  C-term amino
XDNXDDAAFLXFXL

SEQ ID NO: 1084 - protein, 14 aa, Artificial Sequence
  Description of Artificial Sequence: Synthetic peptide
  N-term Acetic Acid
  MOD_RES (1)..(1): (R)-2-allylpyrrolidine-2-carboxylic acid
  MOD_RES (4)..(4): 2-amino-2-(pent-4-en-1-yl)hept-6-enoic acid
  MOD_RES (11)..(11): (S)-3-amino-1-((pent-4-en-1-yloxy)carbonyl)pyrrolidine-3- carboxylic acid
  MOD_RES (12)..(12): (S)-2-amino-3-(2-chlorophenyl)propanoic acid
  MOD_RES (13)..(13): (S)-2-amino-3-(benzo[b]thiophen-3-yl)propanoic acid
  C-term amino
XDSXDDAAFLXFXL

SEQ ID NO: 1085 - protein, 14 aa, Artificial Sequence
  Description of Artificial Sequence: Synthetic peptide
  N-term Acetic Acid
  MOD_RES (1)..(1): (R)-2-allylpyrrolidine-2-carboxylic acid
  MOD_RES (4)..(4): 2-amino-2-(pent-4-en-1-yl)hept-6-enoic acid
  MOD_RES (11)..(11): (S)-3-amino-1-((pent-4-en-1-yloxy)carbonyl)pyrrolidine-3- carboxylic acid
  MOD_RES (12)..(12): (S)-2-amino-3-(2-chlorophenyl)propanoic acid
  MOD_RES (13)..(13): (S)-2-amino-3-(benzo[b]thiophen-3-yl)propanoic acid
  C-term amino
XDTXDDAAFLXFXL

SEQ ID NO: 1086 - protein, 14 aa, Artificial Sequence
  Description of Artificial Sequence: Synthetic peptide
  N-term Acetic Acid
  MOD_RES (1)..(1): (R)-2-allylpyrrolidine-2-carboxylic acid
  MOD_RES (3)..(3): (S)-2-amino-4,4-dimethylpentanoic acid
  MOD_RES (4)..(4): 2-amino-2-(pent-4-en-1-yl)hept-6-enoic acid
  MOD_RES (11)..(11): (S)-3-amino-1-((pent-4-en-1-yloxy)carbonyl)pyrrolidine-3- carboxylic acid
  MOD_RES (12)..(12): (S)-2-amino-3-(thiophen-3-yl)propanoic acid
  MOD_RES (13)..(13): (S)-2-amino-3-(2,3-difluorophenyl)propanoic acid
  C-term amino
XDXXDDAAFLXXFQ

SEQ ID NO: 1087 - protein, 14 aa, Artificial Sequence
  Description of Artificial Sequence: Synthetic peptide
  N-term Acetic Acid
  MOD_RES (1)..(1): (R)-2-allylpyrrolidine-2-carboxylic acid
  MOD_RES (3)..(3): (S)-2-amino-4,4-dimethylpentanoic acid
  MOD_RES (4)..(4): 2-amino-2-(pent-4-en-1-yl)hept-6-enoic acid
  MOD_RES (11)..(11): (S)-3-amino-1-((pent-4-en-1-yloxy)carbonyl)pyrrolidine-3- carboxylic acid
  MOD_RES (12)..(12): (S)-2-amino-3-(thiophen-3-yl)propanoic acid
  MOD_RES (13)..(13): (S)-2-amino-3-(2,3-difluorophenyl)propanoic acid
  C-term amino
XDXXDDAAFLXXFS

SEQ ID NO: 1088 - protein, 14 aa, Artificial Sequence
  Description of Artificial Sequence: Synthetic peptide
  N-term Acetic Acid
  MOD_RES (1)..(1): (R)-2-allylpyrrolidine-2-carboxylic acid
  MOD_RES (3)..(3): (S)-2-amino-4,4-dimethylpentanoic acid
  MOD_RES (4)..(4): 2-amino-2-(pent-4-en-1-yl)hept-6-enoic acid
  MOD_RES (11)..(11): (S)-3-amino-1-((pent-4-en-1-yloxy)carbonyl)pyrrolidine-3- carboxylic acid
  MOD_RES (12)..(12): (S)-2-amino-3-(thiophen-3-yl)propanoic acid
  MOD_RES (13)..(13): (S)-2-amino-3-(3,4-difluorophenyl)propanoic acid
  C-term amino
XDXXDDAAFLXXFQ

SEQ ID NO: 1089 - protein, 14 aa, Artificial Sequence
  Description of Artificial Sequence: Synthetic peptide
  N-term Acetic Acid
  MOD_RES (1)..(1): (R)-2-allylpyrrolidine-2-carboxylic acid
  MOD_RES (3)..(3): (S)-2-amino-4,4-dimethylpentanoic acid
  MOD_RES (4)..(4): 2-amino-2-(pent-4-en-1-yl)hept-6-enoic acid
  MOD_RES (11)..(11): (S)-3-amino-1-((pent-4-en-1-yloxy)carbonyl)pyrrolidine-3- carboxylic acid
  MOD_RES (12)..(12): (S)-2-amino-3-(thiophen-3-yl)propanoic acid
  MOD_RES (13)..(13): (S)-2-amino-3-(3,4-difluorophenyl)propanoic acid
  C-term amino
XDXXDDAAFLXXFS

SEQ ID NO: 1090 - protein, 14 aa, Artificial Sequence
  Description of Artificial Sequence: Synthetic peptide
  N-term Acetic Acid
  MOD_RES (1)..(1): (R)-2-allylpyrrolidine-2-carboxylic acid
  MOD_RES (3)..(3): (S)-2-amino-4,4-dimethylpentanoic acid
  MOD_RES (4)..(4): 2-amino-2-(pent-4-en-1-yl)hept-6-enoic acid
  MOD_RES (11)..(11): (S)-3-amino-1-((pent-4-en-1-yloxy)carbonyl)pyrrolidine-3- carboxylic acid
  MOD_RES (12)..(12): (S)-2-amino-3-(thiophen-3-yl)propanoic acid
  MOD_RES (13)..(13): (S)-2-amino-3-(3,4-dimethoxyphenyl)propanoic acid
  C-term amino
XDXXDDAAFLXXFQ

SEQ ID NO: 1091 - protein, 14 aa, Artificial Sequence
  Description of Artificial Sequence: Synthetic peptide
  N-term Acetic Acid
  MOD_RES (1)..(1): (R)-2-allylpyrrolidine-2-carboxylic acid
  MOD_RES (3)..(3): (S)-2-amino-4,4-dimethylpentanoic acid
  MOD_RES (4)..(4): 2-amino-2-(pent-4-en-1-yl)hept-6-enoic acid
  MOD_RES (11)..(11): (S)-3-amino-1-((pent-4-en-1-yloxy)carbonyl)pyrrolidine-3- carboxylic acid
  MOD_RES (12)..(12): (S)-2-amino-3-(thiophen-3-yl)propanoic acid
  MOD_RES (13)..(13): (S)-2-amino-3-(3,4-dimethoxyphenyl)propanoic acid
  C-term amino
XDXXDDAAFLXXFS

SEQ ID NO: 1092 - protein, 14 aa, Artificial Sequence
  Description of Artificial Sequence: Synthetic peptide
  N-term Acetic Acid
  MOD_RES (1)..(1): (R)-2-allylpyrrolidine-2-carboxylic acid
  MOD_RES (3)..(3): (S)-2-amino-4,4-dimethylpentanoic acid
  MOD_RES (4)..(4): 2-amino-2-(pent-4-en-1-yl)hept-6-enoic acid
  MOD_RES (11)..(11): (S)-3-amino-1-((pent-4-en-1-yloxy)carbonyl)pyrrolidine-3- carboxylic acid
  MOD_RES (12)..(12): (S)-2-amino-3-(thiophen-3-yl)propanoic acid
  C-term amino
XDXXDDAAFLXXWQ

SEQ ID NO: 1093 - protein, 14 aa, Artificial Sequence
  Description of Artificial Sequence: Synthetic peptide
  N-term Acetic Acid
  MOD_RES (1)..(1): (R)-2-allylpyrrolidine-2-carboxylic acid
  MOD_RES (3)..(3): (S)-2-amino-4,4-dimethylpentanoic acid
  MOD_RES (4)..(4): 2-amino-2-(pent-4-en-1-yl)hept-6-enoic acid
  MOD_RES (11)..(11): (S)-3-amino-1-((pent-4-en-1-yloxy)carbonyl)pyrrolidine-3- carboxylic acid
  MOD_RES (12)..(12): (S)-2-amino-3-(thiophen-3-yl)propanoic acid
  C-term amino
XDXXDDAAFLXXWS

SEQ ID NO: 1094 - protein, 14 aa, Artificial Sequence
  Description of Artificial Sequence: Synthetic peptide
  N-term Acetic Acid
  MOD_RES (1)..(1): (R)-2-allylpyrrolidine-2-carboxylic acid
  MOD_RES (3)..(3): (S)-2-amino-4,4-dimethylpentanoic acid
  MOD_RES (4)..(4): 2-amino-2-(pent-4-en-1-yl)hept-6-enoic acid
  MOD_RES (11)..(11): (S)-3-amino-1-((pent-4-en-1-yloxy)carbonyl)pyrrolidine-3- carboxylic acid
  MOD_RES (12)..(12): (S)-2-amino-3-(thiophen-3-yl)propanoic acid
  MOD_RES (13)..(13): 1-methyl-L-tryptophan
  C-term amino
XDXXDDAAFLXXWQ

SEQ ID NO: 1095 - protein, 14 aa, Artificial Sequence
  Description of Artificial Sequence: Synthetic peptide
  N-term Acetic Acid
  MOD_RES (1)..(1): (R)-2-allylpyrrolidine-2-carboxylic acid
  MOD_RES (3)..(3): (S)-2-amino-4,4-dimethylpentanoic acid
  MOD_RES (4)..(4): 2-amino-2-(pent-4-en-1-yl)hept-6-enoic acid
  MOD_RES (11)..(11): (S)-3-amino-1-((pent-4-en-1-yloxy)carbonyl)pyrrolidine-3- carboxylic acid
  MOD_RES (12)..(12): (S)-2-amino-3-(thiophen-3-yl)propanoic acid
  MOD_RES (13)..(13): 1-methyl-L-tryptophan
  C-term amino
XDXXDDAAFLXXWS

SEQ ID NO: 1096 - protein, 14 aa, Artificial Sequence
  Description of Artificial Sequence: Synthetic peptide
  N-term Acetic Acid
  MOD_RES (1)..(1): (R)-2-allylpyrrolidine-2-carboxylic acid
  MOD_RES (3)..(3): (S)-2-amino-4,4-dimethylpentanoic acid
  MOD_RES (4)..(4): 2-amino-2-(pent-4-en-1-yl)hept-6-enoic acid
  MOD_RES (11)..(11): (S)-3-amino-1-((pent-4-en-1-yloxy)carbonyl)pyrrolidine-3- carboxylic acid
  MOD_RES (12)..(12): (S)-2-amino-3-(thiophen-3-yl)propanoic acid
  MOD_RES (13)..(13): (S)-2-amino-3-(6-chloro-1H-indol-3-yl)propanoic acid
  C-term amino
XDXXDDAAFLXXXQ

SEQ ID NO: 1097 - protein, 14 aa, Artificial Sequence
  Description of Artificial Sequence: Synthetic peptide
  N-term Acetic Acid
  MOD_RES (1)..(1): (R)-2-allylpyrrolidine-2-carboxylic acid
  MOD_RES (3)..(3): (S)-2-amino-4,4-dimethylpentanoic acid
  MOD_RES (4)..(4): 2-amino-2-(pent-4-en-1-yl)hept-6-enoic acid
  MOD_RES (11)..(11): (S)-3-amino-1-((pent-4-en-1-yloxy)carbonyl)pyrrolidine-3- carboxylic acid
  MOD_RES (12)..(12): (S)-2-amino-3-(thiophen-3-yl)propanoic acid
  MOD_RES (13)..(13): (S)-2-amino-3-(6-chloro-1H-indol-3-yl)propanoic acid
  C-term amino
XDXXDDAAFLXXXS

SEQ ID NO: 1098 - protein, 14 aa, Artificial Sequence
  Description of Artificial Sequence: Synthetic peptide
  N-term Acetic Acid
  MOD_RES (1)..(1): (R)-2-allylpyrrolidine-2-carboxylic acid
  MOD_RES (3)..(3): (S)-2-amino-4,4-dimethylpentanoic acid
  MOD_RES (4)..(4): 2-amino-2-(pent-4-en-1-yl)hept-6-enoic acid
  MOD_RES (11)..(11): (S)-3-amino-1-((pent-4-en-1-yloxy)carbonyl)pyrrolidine-3- carboxylic acid
  MOD_RES (12)..(12): (S)-2-amino-3-(thiophen-3-yl)propanoic acid
  MOD_RES (13)..(13): (S)-2-amino-3-(benzo[b]thiophen-3-yl)propanoic acid
  C-term amino
XDXXDEAAFLXXXQ

SEQ ID NO: 1099 - protein, 14 aa, Artificial Sequence
  Description of Artificial Sequence: Synthetic peptide
  N-term Acetic Acid
  MOD_RES (1)..(1): (R)-2-allylpyrrolidine-2-carboxylic acid
  MOD_RES (3)..(3): (S)-2-amino-4,4-dimethylpentanoic acid
  MOD_RES (4)..(4): 2-amino-2-(pent-4-en-1-yl)hept-6-enoic acid
  MOD_RES (6)..(6): (S)-2-aminohexanedioic acid
  MOD_RES (11)..(11): (S)-3-amino-1-((pent-4-en-1-yloxy)carbonyl)pyrrolidine-3- carboxylic acid
  MOD_RES (12)..(12): (S)-2-amino-3-(thiophen-3-yl)propanoic acid
  MOD_RES (13)..(13): (S)-2-amino-3-(benzo[b]thiophen-3-yl)propanoic acid
  C-term amino
XDXXDXAAFLXXXQ

SEQ ID NO: 1100 - protein, 14 aa, Artificial Sequence
  Description of Artificial Sequence: Synthetic peptide
  N-term Acetic Acid
  MOD_RES (1)..(1): (R)-2-allylpyrrolidine-2-carboxylic acid
  MOD_RES (3)..(3): (S)-2-amino-4,4-dimethylpentanoic acid
  MOD_RES (4)..(4): 2-amino-2-(pent-4-en-1-yl)hept-6-enoic acid
  MOD_RES (11)..(11): (S)-3-amino-1-((pent-4-en-1-yloxy)carbonyl)pyrrolidine-3- carboxylic acid
  MOD_RES (12)..(12): (S)-2-amino-3-(thiophen-3-yl)propanoic acid
  MOD_RES (13)..(13): (S)-2-amino-3-(benzo[b]thiophen-3-yl)propanoic acid
  C-term amino
XDXXDWAAFLXXXQ

SEQ ID NO: 1101 - protein, 14 aa, Artificial Sequence
  Description of Artificial Sequence: Synthetic peptide
  N-term Acetic Acid
  MOD_RES (1)..(1): (R)-2-allylpyrrolidine-2-carboxylic acid
  MOD_RES (3)..(3): (S)-2-amino-4,4-dimethylpentanoic acid
  MOD_RES (4)..(4): 2-amino-2-(pent-4-en-1-yl)hept-6-enoic acid
  MOD_RES (11)..(11): (S)-3-amino-1-((pent-4-en-1-yloxy)carbonyl)pyrrolidine-3- carboxylic acid
  MOD_RES (12)..(12): (S)-2-amino-3-(thiophen-3-yl)propanoic acid
  MOD_RES (13)..(13): (S)-2-amino-3-(benzo[b]thiophen-3-yl)propanoic acid
  C-term amino
XDXXDQAAFLXXXQ

SEQ ID NO: 1102 - protein, 14 aa, Artificial Sequence
  Description of Artificial Sequence: Synthetic peptide
  N-term Acetic Acid
  MOD_RES (1)..(1): (R)-2-allylpyrrolidine-2-carboxylic acid
  MOD_RES (3)..(3): (S)-2-amino-4,4-dimethylpentanoic acid
  MOD_RES (4)..(4): 2-amino-2-(pent-4-en-1-yl)hept-6-enoic acid
  MOD_RES (11)..(11): (S)-3-amino-1-((pent-4-en-1-yloxy)carbonyl)pyrrolidine-3- carboxylic acid
  MOD_RES (12)..(12): (S)-2-amino-3-(thiophen-3-yl)propanoic acid
  MOD_RES (13)..(13): (S)-2-amino-3-(benzo[b]thiophen-3-yl)propanoic acid
  C-term amino
XDXXDFAAFLXXXQ

SEQ ID NO: 1103 - protein, 14 aa, Artificial Sequence
  Description of Artificial Sequence: Synthetic peptide
  N-term Acetic Acid
  MOD_RES (1)..(1): (R)-2-allylpyrrolidine-2-carboxylic acid
  MOD_RES (3)..(3): (S)-2-amino-4,4-dimethylpentanoic acid
  MOD_RES (4)..(4): 2-amino-2-(pent-4-en-1-yl)hept-6-enoic acid
  MOD_RES (11)..(11): (S)-3-amino-1-((pent-4-en-1-yloxy)carbonyl)pyrrolidine-3- carboxylic acid
  MOD_RES (12)..(12): (S)-2-amino-3-(thiophen-3-yl)propanoic acid
  MOD_RES (13)..(13): (S)-2-amino-3-(benzo[b]thiophen-3-yl)propanoic acid
  C-term amino
XDXXDVAAFLXXXQ

SEQ ID NO: 1104 - protein, 14 aa, Artificial Sequence
  Description of Artificial Sequence: Synthetic peptide
  N-term Acetic Acid
  MOD_RES (1)..(1): (R)-2-allylpyrrolidine-2-carboxylic acid
  MOD_RES (3)..(3): (S)-2-amino-4,4-dimethylpentanoic acid
  MOD_RES (4)..(4): 2-amino-2-(pent-4-en-1-yl)hept-6-enoic acid
  MOD_RES (11)..(11): (S)-3-amino-1-((pent-4-en-1-yloxy)carbonyl)pyrrolidine-3- carboxylic acid
  MOD_RES (12)..(12): (S)-2-amino-3-(thiophen-3-yl)propanoic acid
  MOD_RES (13)..(13): (S)-2-amino-3-(benzo[b]thiophen-3-yl)propanoic acid
  C-term amino
XDXXDSAAFLXXXQ

SEQ ID NO: 1105 - protein, 14 aa, Artificial Sequence
  Description of Artificial Sequence: Synthetic peptide
  N-term Acetic Acid
  MOD_RES (1)..(1): (R)-2-allylpyrrolidine-2-carboxylic acid
  MOD_RES (3)..(3): (S)-2-amino-4,4-dimethylpentanoic acid
  MOD_RES (4)..(4): 2-amino-2-(pent-4-en-1-yl)hept-6-enoic acid
  MOD_RES (11)..(11): (S)-3-amino-1-((pent-4-en-1-yloxy)carbonyl)pyrrolidine-3- carboxylic acid
  MOD_RES (12)..(12): (S)-2-amino-3-(thiophen-3-yl)propanoic acid
  MOD_RES (13)..(13): (S)-2-amino-3-(benzo[b]thiophen-3-yl)propanoic acid
  C-term amino
XDXXDLAAFLXXXQ

SEQ ID NO: 1106 - protein, 14 aa, Artificial Sequence
  Description of Artificial Sequence: Synthetic peptide
  N-term Acetic Acid
  MOD_RES (1)..(1): (R)-2-allylpyrrolidine-2-carboxylic acid
  MOD_RES (3)..(3): (S)-2-amino-4,4-dimethylpentanoic acid
  MOD_RES (4)..(4): 2-amino-2-(pent-4-en-1-yl)hept-6-enoic acid
  MOD_RES (6)..(6): 1-(carboxymethyl)-L-tryptophan
  MOD_RES (11)..(11): (S)-3-amino-1-((pent-4-en-1-yloxy)carbonyl)pyrrolidine-3- carboxylic acid
  MOD_RES (12)..(12): (S)-2-amino-3-(thiophen-3-yl)propanoic acid
  MOD_RES (13)..(13): (S)-2-amino-3-(benzo[b]thiophen-3-yl)propanoic acid
  C-term amino
XDXXDWAAFLXXXQ

SEQ ID NO: 1107 - protein, 14 aa, Artificial Sequence
  Description of Artificial Sequence: Synthetic peptide
  N-term Acetic Acid
  MOD_RES (1)..(1): (R)-2-allylpyrrolidine-2-carboxylic acid
  MOD_RES (3)..(3): (S)-2-amino-4,4-dimethylpentanoic acid
  MOD_RES (4)..(4): 2-amino-2-(pent-4-en-1-yl)hept-6-enoic acid
  MOD_RES (6)..(6): (S)-2-amino-3-((carboxymethyl)(4,4,4-trifluorobutyl)amino) propanoic acid
  MOD_RES (11)..(11): (S)-3-amino-1-((pent-4-en-1-yloxy)carbonyl)pyrrolidine-3- carboxylic acid
  MOD_RES (12)..(12): (S)-2-amino-3-(2-chlorophenyl)propanoic acid
  MOD_RES (13)..(13): (S)-2-amino-3-(benzo[b]thiophen-3-yl)propanoic acid
  C-term amino
XDXXDXAAFNXFXQ

SEQ ID NO: 1108 - protein, 14 aa, Artificial Sequence
  Description of Artificial Sequence: Synthetic peptide
  N-term Acetic Acid
  MOD_RES (1)..(1): (R)-2-allylpyrrolidine-2-carboxylic acid
  MOD_RES (3)..(3): (S)-2-amino-4,4-dimethylpentanoic acid
  MOD_RES (4)..(4): 2-amino-2-(pent-4-en-1-yl)hept-6-enoic acid
  MOD_RES (6)..(6): (S)-2-amino-3-(benzyl(carboxymethyl)amino)propanoic acid
  MOD_RES (11)..(11): (S)-3-amino-1-((pent-4-en-1-yloxy)carbonyl)pyrrolidine-3- carboxylic acid
  MOD_RES (12)..(12): (S)-2-amino-3-(2-chlorophenyl)propanoic acid
  MOD_RES (13)..(13): (S)-2-amino-3-(benzo[b]thiophen-3-yl)propanoic acid
  C-term amino
XDXXDXAAFNXFXQ

SEQ ID NO: 1109 - protein, 14 aa, Artificial Sequence
  Description of Artificial Sequence: Synthetic peptide
  N-term Acetic Acid
  MOD_RES (1)..(1): (R)-2-allylpyrrolidine-2-carboxylic acid
  MOD_RES (3)..(3): (S)-2-amino-4,4-dimethylpentanoic acid
  MOD_RES (4)..(4): 2-amino-2-(pent-4-en-1-yl)hept-6-enoic acid
  MOD_RES (6)..(6): (S)-2-amino-3-((carboxymethyl)((perfluorophenyl)methyl)amino) propanoic acid
  MOD_RES (11)..(11): (S)-3-amino-1-((pent-4-en-1-yloxy)carbonyl)pyrrolidine-3- carboxylic acid
  MOD_RES (12)..(12): (S)-2-amino-3-(2-chlorophenyl)propanoic acid
  MOD_RES (13)..(13): (S)-2-amino-3-(benzo[b]thiophen-3-yl)propanoic acid
  C-term amino
XDXXDXAAFNXFXQ

SEQ ID NO: 1110 - protein, 14 aa, Artificial Sequence
  Description of Artificial Sequence: Synthetic peptide
  N-term Acetic Acid
  MOD_RES (1)..(1): (R)-2-allylpyrrolidine-2-carboxylic acid
  MOD_RES (3)..(3): (S)-2-amino-4,4-dimethylpentanoic acid
  MOD_RES (4)..(4): 2-amino-2-(pent-4-en-1-yl)hept-6-enoic acid
  MOD_RES (6)..(6): (S)-2-amino-3-((carboxymethyl)(isopropyl)amino)propanoic acid
  MOD_RES (11)..(11): (S)-3-amino-1-((pent-4-en-1-yloxy)carbonyl)pyrrolidine-3- carboxylic acid
  MOD_RES (12)..(12): (S)-2-amino-3-(2-chlorophenyl)propanoic acid
  MOD_RES (13)..(13): (S)-2-amino-3-(benzo[b]thiophen-3-yl)propanoic acid
  C-term amino
XDXXDXAAFNXFXQ

SEQ ID NO: 1111 - protein, 14 aa, Artificial Sequence
  Description of Artificial Sequence: Synthetic peptide
  N-term Acetic Acid
  MOD_RES (1)..(1): (R)-2-allylpyrrolidine-2-carboxylic acid
  MOD_RES (3)..(3): (S)-2-amino-4,4-dimethylpentanoic acid
  MOD_RES (4)..(4): 2-amino-2-(pent-4-en-1-yl)hept-6-enoic acid
  MOD_RES (6)..(6): (S)-2-amino-3-((carboxymethyl)(isopropyl)amino)propanoic acid
  MOD_RES (11)..(11): (S)-2-amino-2-methyldec-9-enoic acid
  MOD_RES (12)..(12): (S)-2-amino-3-(thiophen-3-yl)propanoic acid
  MOD_RES (13)..(13): (S)-2-amino-3-(benzo[b]thiophen-3-yl)propanoic acid
  C-term amino
XDXXDXAAFNXXXQ

SEQ ID NO: 1112 - protein, 14 aa, Artificial Sequence
  Description of Artificial Sequence: Synthetic peptide
  N-term Acetic Acid
  MOD_RES (1)..(1): (R)-2-allylpyrrolidine-2-carboxylic acid
  MOD_RES (3)..(3): (S)-2-amino-4,4-dimethylpentanoic acid
  MOD_RES (4)..(4): 2-amino-2-(pent-4-en-1-yl)hept-6-enoic acid
  MOD_RES (6)..(6): (S)-2-amino-3-((carboxymethyl)(4,4,4-trifluorobutyl)amino) propanoic acid
  MOD_RES (11)..(11): (S)-2-amino-2-methyldec-9-enoic acid
  MOD_RES (12)..(12): (S)-2-amino-3-(thiophen-3-yl)propanoic acid
  MOD_RES (13)..(13): (S)-2-amino-3-(benzo[b]thiophen-3-yl)propanoic acid
  C-term amino
XDXXDXAAFNXXXQ

SEQ ID NO: 1113 - protein, 14 aa, Artificial Sequence
  Description of Artificial Sequence: Synthetic peptide
  N-term Acetic Acid
  MOD_RES (1)..(1): (R)-2-allylpyrrolidine-2-carboxylic acid
  MOD_RES (3)..(3): (S)-2-amino-4,4-dimethylpentanoic acid
  MOD_RES (4)..(4): 2-amino-2-(pent-4-en-1-yl)hept-6-enoic acid
  MOD_RES (6)..(6): (S)-2-amino-3-(benzyl(carboxymethyl)amino)propanoic acid
  MOD_RES (11)..(11): (S)-2-amino-2-methyldec-9-enoic acid
  MOD_RES (12)..(12): (S)-2-amino-3-(thiophen-3-yl)propanoic acid
  MOD_RES (13)..(13): (S)-2-amino-3-(benzo[b]thiophen-3-yl)propanoic acid
  C-term amino
XDXXDXAAFNXXXQ

SEQ ID NO: 1114 - protein, 14 aa, Artificial Sequence
  Description of Artificial Sequence: Synthetic peptide
  N-term Acetic Acid
  MOD_RES (1)..(1): (R)-2-allylpyrrolidine-2-carboxylic acid
  MOD_RES (3)..(3): (S)-2-amino-4,4-dimethylpentanoic acid
  MOD_RES (4)..(4): 2-amino-2-(pent-4-en-1-yl)hept-6-enoic acid
  MOD_RES (6)..(6): (S)-2-amino-3-((3,3,3-trifluoropropyl)amino)propanoic acid
  MOD_RES (11)..(11): (S)-3-amino-1-((pent-4-en-1-yloxy)carbonyl)pyrrolidine-3- carboxylic acid
  MOD_RES (12)..(12): (S)-2-amino-3-(2-chlorophenyl)propanoic acid
  MOD_RES (13)..(13): (S)-2-amino-3-(benzo[b]thiophen-3-yl)propanoic acid
  C-term amino
XDXXDXAAFNXFXQ

SEQ ID NO: 1115 - protein, 14 aa, Artificial Sequence
  Description of Artificial Sequence: Synthetic peptide
  N-term Acetic Acid
  MOD_RES (1)..(1): (R)-2-allylpyrrolidine-2-carboxylic acid
  MOD_RES (3)..(3): (S)-2-amino-4,4-dimethylpentanoic acid
  MOD_RES (4)..(4): 2-amino-2-(pent-4-en-1-yl)hept-6-enoic acid
  MOD_RES (6)..(6): (S)-3-(2-amino-2-carboxyethyl)benzoic acid
  MOD_RES (11)..(11): (S)-3-amino-1-((pent-4-en-1-yloxy)carbonyl)pyrrolidine-3- carboxylic acid
  MOD_RES (12)..(12): (S)-2-amino-3-(thiophen-3-yl)propanoic acid
  MOD_RES (13)..(13): (S)-2-amino-3-(benzo[b]thiophen-3-yl)propanoic acid
  C-term amino
XDXXDXAAFLXXXQ

SEQ ID NO: 1116 - protein, 14 aa, Artificial Sequence
  Description of Artificial Sequence: Synthetic peptide
  N-term Acetic Acid
  MOD_RES (1)..(1): (R)-2-allylpyrrolidine-2-carboxylic acid
  MOD_RES (3)..(3): (S)-2-amino-4,4-dimethylpentanoic acid
  MOD_RES (4)..(4): 2-amino-2-(pent-4-en-1-yl)hept-6-enoic acid
  MOD_RES (6)..(6): (S)-3-(2-amino-2-carboxyethyl)benzoic acid
  MOD_RES (11)..(11): (S)-3-amino-1-((pent-4-en-1-yloxy)carbonyl)pyrrolidine-3- carboxylic acid
  MOD_RES (12)..(12): (S)-2-amino-3-(2-(trifluoromethyl)phenyl)propanoic acid
  MOD_RES (13)..(13): (S)-2-amino-3-(benzo[b]thiophen-3-yl)propanoic acid
  C-term amino
XDXXDXAAFLXFXQ

SEQ ID NO: 1117 - protein, 14 aa, Artificial Sequence
  Description of Artificial Sequence: Synthetic peptide
  N-term Acetic Acid
  MOD_RES (1)..(1): (R)-2-allylpyrrolidine-2-carboxylic acid
  MOD_RES (3)..(3): (S)-2-amino-4,4-dimethylpentanoic acid
  MOD_RES (4)..(4): 2-amino-2-(pent-4-en-1-yl)hept-6-enoic acid
  MOD_RES (7)..(7): (S)-2-amino-3-(4-(3-(dimethylamino)prop-1-yn-1-yl)phenyl) propanoic acid
  MOD_RES (11)..(11): (S)-3-amino-1-((pent-4-en-1-yloxy)carbonyl)pyrrolidine-3- carboxylic acid
  MOD_RES (13)..(13): (S)-2-amino-3-(benzo[b]thiophen-3-yl)propanoic acid
XDXXDDFAFLXFXQ

SEQ ID NO: 1118 - protein, 14 aa, Artificial Sequence
  Description of Artificial Sequence: Synthetic peptide
  N-term Acetic Acid
  MOD_RES (1)..(1): (R)-2-allylpyrrolidine-2-carboxylic acid
  MOD_RES (3)..(3): (S)-2-amino-4,4-dimethylpentanoic acid
  MOD_RES (4)..(4): 2-amino-2-(pent-4-en-1-yl)hept-6-enoic acid
  MOD_RES (9)..(9): (S)-2-amino-3-(4-(3-(dimethylamino)prop-1-yn-1-yl)phenyl) propanoic acid
  MOD_RES (11)..(11): (S)-3-amino-1-((pent-4-en-1-yloxy)carbonyl)pyrrolidine-3- carboxylic acid
  MOD_RES (13)..(13): (S)-2-amino-3-(benzo[b]thiophen-3-yl)propanoic acid
XDXXDDAAFLXFXQ

SEQ ID NO: 1119 - protein, 14 aa, Artificial Sequence
  Description of Artificial Sequence: Synthetic peptide
  N-term Acetic Acid
  MOD_RES (1)..(1): (R)-2-allylpyrrolidine-2-carboxylic acid
  MOD_RES (3)..(3): N6-((R)-4-((3R,5R,8R,9S,10S,13R,14S,17R)-3-hydroxy-10,13- dimethylhexadecahydro-1H-cyclopenta[a]phenanthren-17-yl) pentanoyl)-L-lysine
  MOD_RES (4)..(4): 2-amino-2-(pent-4-en-1-yl)hept-6-enoic acid
  MOD_RES (11)..(11): (S)-3-amino-1-((pent-4-en-1-yloxy)carbonyl)pyrrolidine-3- carboxylic acid
  MOD_RES (12)..(12): (S)-2-amino-3-(thiophen-3-yl)propanoic acid
  MOD_RES (13)..(13): (S)-2-amino-3-(benzo[b]thiophen-3-yl)propanoic acid
  C-term amino
XDKXDDAAFLXXXQ

SEQ ID NO: 1120 - protein, 14 aa, Artificial Sequence
  Description of Artificial Sequence: Synthetic peptide
  N-term Acetic Acid
  MOD_RES (1)..(1): (R)-2-allylpyrrolidine-2-carboxylic acid
  MOD_RES (3)..(3): (2R,20S)-20-amino-2-((3R,5R,8R,9S,10S,13R,14S,17R)-3-hydroxy-10, 13-dimethylhexadecahydro-1H-cyclopenta[a]phenanthren-17-yl)-5,14 -dioxo-9,12-dioxa-6,15-diazahenicosan-21-oic acid
  MOD_RES (4)..(4): 2-amino-2-(pent-4-en-1-yl)hept-6-enoic acid
  MOD_RES (11)..(11): (S)-3-amino-1-((pent-4-en-1-yloxy)carbonyl)pyrrolidine-3- carboxylic acid
  MOD_RES (12)..(12): (S)-2-amino-3-(thiophen-3-yl)propanoic acid
  MOD_RES (13)..(13): (S)-2-amino-3-(benzo[b]thiophen-3-yl)propanoic acid
  C-term amino
XDKXDDAAFLXXXQ

SEQ ID NO: 1121 - protein, 14 aa, Artificial Sequence
  Description of Artificial Sequence: Synthetic peptide
  N-term Acetic Acid
  MOD_RES (1)..(1): (R)-2-allylpyrrolidine-2-carboxylic acid
  MOD_RES (3)..(3): N6-((3S,5S,7S)-3,5,7-trimethyladamantane-1-carbonyl)-L-lysine
  MOD_RES (4)..(4): 2-amino-2-(pent-4-en-1-yl)hept-6-enoic acid
  MOD_RES (11)..(11): (S)-3-amino-1-((pent-4-en-1-yloxy)carbonyl)pyrrolidine-3- carboxylic acid
  MOD_RES (12)..(12): (S)-2-amino-3-(thiophen-3-yl)propanoic acid
  MOD_RES (13)..(13): (S)-2-amino-3-(benzo[b]thiophen-3-yl)propanoic acid
  C-term amino
XDKXDDAAFLXXXQ

SEQ ID NO: 1122 - protein, 14 aa, Artificial Sequence
  Description of Artificial Sequence: Synthetic peptide
  N-term Acetic Acid
  MOD_RES (1)..(1): (R)-2-allylpyrrolidine-2-carboxylic acid
  MOD_RES (3)..(3): (S)-16-amino-1,10-dioxo-1-(3,5,7-trimethyladamantan-1-yl)-5,8- dioxa-2,11-diazaheptadecan-17-oic acid
  MOD_RES (4)..(4): 2-amino-2-(pent-4-en-1-yl)hept-6-enoic acid
  MOD_RES (11)..(11): (S)-3-amino-1-((pent-4-en-1-yloxy)carbonyl)pyrrolidine-3- carboxylic acid
  MOD_RES (12)..(12): (S)-2-amino-3-(thiophen-3-yl)propanoic acid
  MOD_RES (13)..(13): (S)-2-amino-3-(benzo[b]thiophen-3-yl)propanoic acid
  C-term amino
XDXXDDAAFLXXXQ

SEQ ID NO: 1123 - protein, 14 aa, Artificial Sequence
  Description of Artificial Sequence: Synthetic peptide
  N-term Acetic Acid
  MOD_RES (1)..(1): (R)-2-allylpyrrolidine-2-carboxylic acid
  MOD_RES (3)..(3): (S)-2-amino-4,4-dimethylpentanoic acid
  MOD_RES (4)..(4): 2-amino-2-(pent-4-en-1-yl)hept-6-enoic acid
  MOD_RES (8)..(8): N6-((R)-4-((3R,5R,8R,9S,10S,13R,14S,17R)-3-hydroxy-10,13- dimethylhexadecahydro-1H-cyclopenta[a]phenanthren-17-yl) pentanoyl)-L-lysine
  MOD_RES (11)..(11): (S)-3-amino-1-((pent-4-en-1-yloxy)carbonyl)pyrrolidine-3- carboxylic acid
  MOD_RES (12)..(12): (S)-2-amino-3-(thiophen-3-yl)propanoic acid
  MOD_RES (13)..(13): (S)-2-amino-3-(benzo[b]thiophen-3-yl)propanoic acid
  C-term amino
XDXXDDAKFLXXXQ

SEQ ID NO: 1124 - protein, 14 aa, Artificial Sequence
  Description of Artificial Sequence: Synthetic peptide
  N-term Acetic Acid
  MOD_RES (1)..(1): (R)-2-allylpyrrolidine-2-carboxylic acid
  MOD_RES (3)..(3): (S)-2-amino-4,4-dimethylpentanoic acid
  MOD_RES (4)..(4): 2-amino-2-(pent-4-en-1-yl)hept-6-enoic acid
  MOD_RES (8)..(8): (2R,20S)-20-amino-2-((3R,5R,8R,9S,10S,13R,14S,17R)-3-hydroxy-10, 13-dimethylhexadecahydro-1H-cyclopenta[a]phenanthren-17-yl)-5,14 -dioxo-9,12-dioxa-6,15-diazahenicosan-21-oic acid
  MOD_RES (11)..(11): (S)-3-amino-1-((pent-4-en-1-yloxy)carbonyl)pyrrolidine-3- carboxylic acid
  MOD_RES (12)..(12): (S)-2-amino-3-(thiophen-3-yl)propanoic acid
  MOD_RES (13)..(13): (S)-2-amino-3-(benzo[b]thiophen-3-yl)propanoic acid
  C-term amino
XDXXDDAKFLXXXQ

SEQ ID NO: 1125 - protein, 14 aa, Artificial Sequence
  Description of Artificial Sequence: Synthetic peptide
  N-term Acetic Acid
  MOD_RES (1)..(1): (R)-2-allylpyrrolidine-2-carboxylic acid
  MOD_RES (3)..(3): (S)-2-amino-4,4-dimethylpentanoic acid
  MOD_RES (4)..(4): 2-amino-2-(pent-4-en-1-yl)hept-6-enoic acid
  MOD_RES (8)..(8): N6-((3S,5S,7S)-3,5,7-trimethyladamantane-1-carbonyl)-L-lysine
  MOD_RES (11)..(11): (S)-3-amino-1-((pent-4-en-1-yloxy)carbonyl)pyrrolidine-3- carboxylic acid
  MOD_RES (12)..(12): (S)-2-amino-3-(thiophen-3-yl)propanoic acid
  MOD_RES (13)..(13): (S)-2-amino-3-(benzo[b]thiophen-3-yl)propanoic acid
  C-term amino
XDXXDDAKFLXXXQ

SEQ ID NO: 1126 - protein, 14 aa, Artificial Sequence
  Description of Artificial Sequence: Synthetic peptide
  N-term Acetic Acid
  MOD_RES (1)..(1): (R)-2-allylpyrrolidine-2-carboxylic acid
  MOD_RES (3)..(3): (S)-2-amino-4,4-dimethylpentanoic acid
  MOD_RES (4)..(4): 2-amino-2-(pent-4-en-1-yl)hept-6-enoic acid
  MOD_RES (8)..(8): (S)-16-amino-1,10-dioxo-1-(3,5,7-trimethyladamantan-1-yl)-5,8- dioxa-2,11-diazaheptadecan-17-oic acid
  MOD_RES (11)..(11): (S)-3-amino-1-((pent-4-en-1-yloxy)carbonyl)pyrrolidine-3- carboxylic acid
  MOD_RES (12)..(12): (S)-2-amino-3-(thiophen-3-yl)propanoic acid
  MOD_RES (13)..(13): (S)-2-amino-3-(benzo[b]thiophen-3-yl)propanoic acid
  C-term amino
XDXXDDAXFLXXXQ

SEQ ID NO: 1127 - protein, 15 aa, Artificial Sequence
  Description of Artificial Sequence: Synthetic peptide
  N-term Acetic Acid
  MOD_RES (1)..(1): (R)-2-allylpyrrolidine-2-carboxylic acid
  MOD_RES (3)..(3): (S)-2-amino-4,4-dimethylpentanoic acid
  MOD_RES (4)..(4): 2-amino-2-(pent-4-en-1-yl)hept-6-enoic acid
  MOD_RES (11)..(11): (S)-3-amino-1-((pent-4-en-1-yloxy)carbonyl)pyrrolidine-3- carboxylic acid
  MOD_RES (12)..(12): (S)-2-amino-3-(thiophen-3-yl)propanoic acid
  MOD_RES (13)..(13): (S)-2-amino-3-(benzo[b]thiophen-3-yl)propanoic acid
  MOD_RES (15)..(15): N6-((R)-4-((3R,5R,8R,9S,10S,13R,14S,17R)-3-hydroxy-10,13- dimethylhexadecahydro-1H-cyclopenta[a]phenanthren-17-yl) pentanoyl)-L-lysine
  C-term amino
XDXXDDAAFLXXXQK

SEQ ID NO: 1128 - protein, 15 aa, Artificial Sequence
  Description of Artificial Sequence: Synthetic peptide
  N-term Acetic Acid
  MOD_RES (1)..(1): (R)-2-allylpyrrolidine-2-carboxylic acid
  MOD_RES (3)..(3): (S)-2-amino-4,4-dimethylpentanoic acid
  MOD_RES (4)..(4): 2-amino-2-(pent-4-en-1-yl)hept-6-enoic acid
  MOD_RES (11)..(11): (S)-3-amino-1-((pent-4-en-1-yloxy)carbonyl)pyrrolidine-3- carboxylic acid
  MOD_RES (12)..(12): (S)-2-amino-3-(thiophen-3-yl)propanoic acid
  MOD_RES (13)..(13): (S)-2-amino-3-(benzo[b]thiophen-3-yl)propanoic acid
  MOD_RES (15)..(15): (2R,20S)-20-amino-2-((3R,5R,8R,9S,10S,13R,14S,17R)-3-hydroxy-10, 13-dimethylhexadecahydro-1H-cyclopenta[a]phenanthren-17-yl)-5,14 -dioxo-9,12-dioxa-6,15-diazahenicosan-21-oic acid
  C-term amino
XDXXDDAAFLXXXQK

SEQ ID NO: 1129 - protein, 15 aa, Artificial Sequence
  Description of Artificial Sequence: Synthetic peptide
  N-term Acetic Acid
  MOD_RES (1)..(1): (R)-2-allylpyrrolidine-2-carboxylic acid
  MOD_RES (3)..(3): (S)-2-amino-4,4-dimethylpentanoic acid
  MOD_RES (4)..(4): 2-amino-2-(pent-4-en-1-yl)hept-6-enoic acid
  MOD_RES (11)..(11): (S)-3-amino-1-((pent-4-en-1-yloxy)carbonyl)pyrrolidine-3- carboxylic acid
  MOD_RES (12)..(12): (S)-2-amino-3-(thiophen-3-yl)propanoic acid
  MOD_RES (13)..(13): (S)-2-amino-3-(benzo[b]thiophen-3-yl)propanoic acid
  MOD_RES (15)..(15): N6-((3S,5S,7S)-3,5,7-trimethyladamantane-1-carbonyl)-L-lysine
  C-term amino
XDXXDDAAFLXXXQK

SEQ ID NO: 1130 - protein, 15 aa, Artificial Sequence
  Description of Artificial Sequence: Synthetic peptide
  N-term Acetic Acid
  MOD_RES (1)..(1): (R)-2-allylpyrrolidine-2-carboxylic acid
  MOD_RES (3)..(3): (S)-2-amino-4,4-dimethylpentanoic acid
  MOD_RES (4)..(4): 2-amino-2-(pent-4-en-1-yl)hept-6-enoic acid
  MOD_RES (11)..(11): (S)-3-amino-1-((pent-4-en-1-yloxy)carbonyl)pyrrolidine-3- carboxylic acid
  MOD_RES (12)..(12): (S)-2-amino-3-(thiophen-3-yl)propanoic acid
  MOD_RES (13)..(13): (S)-2-amino-3-(benzo[b]thiophen-3-yl)propanoic acid
  MOD_RES (15)..(15): (S)-16-amino-1,10-dioxo-1-(3,5,7-trimethyladamantan-1-yl)-5,8- dioxa-2,11-diazaheptadecan-17-oic acid
  C-term amino
XDXXDDAAFLXXXQX

SEQ ID NO: 1131 - protein, 14 aa, Artificial Sequence
  Description of Artificial Sequence: Synthetic peptide
  N-term Acetic Acid
  MOD_RES (1)..(1): (R)-2-allylpyrrolidine-2-carboxylic acid
  MOD_RES (3)..(3): (S)-2-amino-4,4-dimethylpentanoic acid
  MOD_RES (4)..(4): 2-amino-2-(pent-4-en-1-yl)hept-6-enoic acid
  MOD_RES (7)..(7): (S)-2-amino-5-morpholinopentanoic acid
  MOD_RES (11)..(11): (S)-3-amino-1-((pent-4-en-1-yloxy)carbonyl)pyrrolidine-3- carboxylic acid
  MOD_RES (12)..(12): (S)-2-amino-3-(thiophen-3-yl)propanoic acid
  MOD_RES (13)..(13): (S)-2-amino-3-(benzo[b]thiophen-3-yl)propanoic acid
  C-term amino
XDXXDDXAFLXXXQ

SEQ ID NO: 1132 - protein, 14 aa, Artificial Sequence
  Description of Artificial Sequence: Synthetic peptide
  N-term Acetic Acid
  MOD_RES (1)..(1): (R)-2-allylpyrrolidine-2-carboxylic acid
  MOD_RES (3)..(3): (S)-2-amino-4,4-dimethylpentanoic acid
  MOD_RES (4)..(4): 2-amino-2-(pent-4-en-1-yl)hept-6-enoic acid
  MOD_RES (7)..(7): (S)-2-amino-5-(4,4-difluoropiperidin-1-yl)pentanoic acid
  MOD_RES (11)..(11): (S)-3-amino-1-((pent-4-en-1-yloxy)carbonyl)pyrrolidine-3- carboxylic acid
  MOD_RES (12)..(12): (S)-2-amino-3-(thiophen-3-yl)propanoic acid
  MOD_RES (13)..(13): (S)-2-amino-3-(benzo[b]thiophen-3-yl)propanoic acid
  C-term amino
XDXXDDXAFLXXXQ

SEQ ID NO: 1133 - protein, 14 aa, Artificial Sequence
  Description of Artificial Sequence: Synthetic peptide
  N-term Acetic Acid
  MOD_RES (1)..(1): (R)-2-allylpyrrolidine-2-carboxylic acid
  MOD_RES (3)..(3): (S)-2-amino-4,4-dimethylpentanoic acid
  MOD_RES (4)..(4): 2-amino-2-(pent-4-en-1-yl)hept-6-enoic acid
  MOD_RES (7)..(7): (S)-2-amino-4-morpholino-4-oxobutanoic acid
  MOD_RES (11)..(11): (S)-3-amino-1-((pent-4-en-1-yloxy)carbonyl)pyrrolidine-3- carboxylic acid
  MOD_RES (12)..(12): (S)-2-amino-3-(thiophen-3-yl)propanoic acid
  MOD_RES (13)..(13): (S)-2-amino-3-(benzo[b]thiophen-3-yl)propanoic acid
  C-term amino
XDXXDDXAFLXXXQ

SEQ ID NO: 1134 - protein, 14 aa, Artificial Sequence
  Description of Artificial Sequence: Synthetic peptide
  N-term Acetic Acid
  MOD_RES (1)..(1): (R)-2-allylpyrrolidine-2-carboxylic acid
  MOD_RES (3)..(3): (S)-2-amino-4,4-dimethylpentanoic acid
  MOD_RES (4)..(4): 2-amino-2-(pent-4-en-1-yl)hept-6-enoic acid
  MOD_RES (7)..(7): (S)-2-amino-4-(4-methylpiperazin-1-yl)-4-oxobutanoic acid
  MOD_RES (11)..(11): (S)-3-amino-1-((pent-4-en-1-yloxy)carbonyl)pyrrolidine-3- carboxylic acid
  MOD_RES (12)..(12): (S)-2-amino-3-(thiophen-3-yl)propanoic acid
  MOD_RES (13)..(13): (S)-2-amino-3-(benzo[b]thiophen-3-yl)propanoic acid
  C-term amino
XDXXDDXAFLXXXQ

SEQ ID NO: 1135 - protein, 14 aa, Artificial Sequence
  Description of Artificial Sequence: Synthetic peptide
  N-term Acetic Acid
  MOD_RES (1)..(1): (R)-2-allylpyrrolidine-2-carboxylic acid
  MOD_RES (3)..(3): (S)-2-amino-4,4-dimethylpentanoic acid
  MOD_RES (4)..(4): 2-amino-2-(pent-4-en-1-yl)hept-6-enoic acid
  MOD_RES (10)..(10): (S)-2-amino-5-morpholinopentanoic acid
  MOD_RES (11)..(11): (S)-3-amino-1-((pent-4-en-1-yloxy)carbonyl)pyrrolidine-3- carboxylic acid
  MOD_RES (12)..(12): (S)-2-amino-3-(thiophen-3-yl)propanoic acid
  MOD_RES (13)..(13): (S)-2-amino-3-(benzo[b]thiophen-3-yl)propanoic acid
  C-term amino
XDXXDDAAFXXXXQ

SEQ ID NO: 1136 - protein, 14 aa, Artificial Sequence
  Description of Artificial Sequence: Synthetic peptide
  N-term Acetic Acid
  MOD_RES (1)..(1): (R)-2-allylpyrrolidine-2-carboxylic acid
  MOD_RES (3)..(3): (S)-2-amino-4,4-dimethylpentanoic acid
  MOD_RES (4)..(4): 2-amino-2-(pent-4-en-1-yl)hept-6-enoic acid
  MOD_RES (10)..(10): (S)-2-amino-5-(4,4-difluoropiperidin-1-yl)pentanoic acid
  MOD_RES (11)..(11): (S)-3-amino-1-((pent-4-en-1-yloxy)carbonyl)pyrrolidine-3- carboxylic acid
  MOD_RES (12)..(12): (S)-2-amino-3-(thiophen-3-yl)propanoic acid
  MOD_RES (13)..(13): (S)-2-amino-3-(benzo[b]thiophen-3-yl)propanoic acid
  C-term amino
XDXXDDAAFXXXXQ

SEQ ID NO: 1137 - protein, 14 aa, Artificial Sequence
  Description of Artificial Sequence: Synthetic peptide
  N-term Acetic Acid
  MOD_RES (1)..(1): (R)-2-allylpyrrolidine-2-carboxylic acid
  MOD_RES (3)..(3): (S)-2-amino-4,4-dimethylpentanoic acid
  MOD_RES (4)..(4): 2-amino-2-(pent-4-en-1-yl)hept-6-enoic acid
  MOD_RES (10)..(10): (S)-2-amino-4-morpholino-4-oxobutanoic acid
  MOD_RES (11)..(11): (S)-3-amino-1-((pent-4-en-1-yloxy)carbonyl)pyrrolidine-3- carboxylic acid
  MOD_RES (12)..(12): (S)-2-amino-3-(thiophen-3-yl)propanoic acid
  MOD_RES (13)..(13): (S)-2-amino-3-(benzo[b]thiophen-3-yl)propanoic acid
  C-term amino
XDXXDDAAFXXXXQ

SEQ ID NO: 1138 - protein, 14 aa, Artificial Sequence
  Description of Artificial Sequence: Synthetic peptide
  N-term Acetic Acid
  MOD_RES (1)..(1): (R)-2-allylpyrrolidine-2-carboxylic acid
  MOD_RES (3)..(3): (S)-2-amino-4,4-dimethylpentanoic acid
  MOD_RES (4)..(4): 2-amino-2-(pent-4-en-1-yl)hept-6-enoic acid
  MOD_RES (10)..(10): (S)-2-amino-4-(4-methylpiperazin-1-yl)-4-oxobutanoic acid
  MOD_RES (11)..(11): (S)-3-amino-1-((pent-4-en-1-yloxy)carbonyl)pyrrolidine-3- carboxylic acid
  MOD_RES (12)..(12): (S)-2-amino-3-(thiophen-3-yl)propanoic acid
  MOD_RES (13)..(13): (S)-2-amino-3-(benzo[b]thiophen-3-yl)propanoic acid
  C-term amino
XDXXDDAAFXXXXQ

SEQ ID NO: 1139 - protein, 14 aa, Artificial Sequence
  Description of Artificial Sequence: Synthetic peptide
  N-term Acetic Acid
  MOD_RES (1)..(1): (R)-2-allylpyrrolidine-2-carboxylic acid
  MOD_RES (3)..(3): (S)-2-amino-4,4-dimethylpentanoic acid
  MOD_RES (4)..(4): 2-amino-2-(pent-4-en-1-yl)hept-6-enoic acid
  MOD_RES (7)..(7): (S)-2-amino-3-(4-(pyridin-3-yl)phenyl)propanoic acid
  MOD_RES (11)..(11): (S)-3-amino-1-((pent-4-en-1-yloxy)carbonyl)pyrrolidine-3- carboxylic acid
  MOD_RES (13)..(13): (S)-2-amino-3-(benzo[b]thiophen-3-yl)propanoic acid
  C-term amino
XDXXDDFAFLXFXQ

SEQ ID NO: 1140 - protein, 14 aa, Artificial Sequence
  Description of Artificial Sequence: Synthetic peptide
  N-term Acetic Acid
  MOD_RES (1)..(1): (R)-2-allylpyrrolidine-2-carboxylic acid
  MOD_RES (3)..(3): (S)-2-amino-4,4-dimethylpentanoic acid
  MOD_RES (4)..(4): 2-amino-2-(pent-4-en-1-yl)hept-6-enoic acid
  MOD_RES (9)..(9): (S)-2-amino-3-(4-(pyridin-3-yl)phenyl)propanoic acid
  MOD_RES (11)..(11): (S)-3-amino-1-((pent-4-en-1-yloxy)carbonyl)pyrrolidine-3- carboxylic acid
  MOD_RES (13)..(13): (S)-2-amino-3-(benzo[b]thiophen-3-yl)propanoic acid
  C-term amino
XDXXDDAAFLXFXQ

SEQ ID NO: 1141 - protein, 13 aa, Artificial Sequence
  Description of Artificial Sequence: Synthetic peptide
  N-term Acetic Acid
  MOD_RES (1)..(1): (R)-2-allylpyrrolidine-2-carboxylic acid
  MOD_RES (3)..(3): (S)-2-amino-4,4-dimethylpentanoic acid
  MOD_RES (4)..(4): 2-amino-2-(pent-4-en-1-yl)hept-6-enoic acid
  MOD_RES (10)..(10): L-homoserine
  MOD_RES (11)..(11): (S)-2-amino-2-methyldec-9-enoic acid
  MOD_RES (12)..(12): (S)-2-amino-3-(2-chlorophenyl)propanoic acid
  MOD_RES (13)..(13): (S)-2-amino-3-(benzo[b]thiophen-3-yl)propanoic acid
  C-term (2R,3R)-2-aminobutane-1,3-diol
XDXXDDAAFSXFX

SEQ ID NO: 1142 - protein, 14 aa, Artificial Sequence
  Description of Artificial Sequence: Synthetic peptide
  N-term Acetic Acid
  MOD_RES (1)..(1): (R)-2-allylpyrrolidine-2-carboxylic acid
  MOD_RES (3)..(3): (S)-2-amino-4,4-dimethylpentanoic acid
  MOD_RES (4)..(4): 2-amino-2-(pent-4-en-1-yl)hept-6-enoic acid
  MOD_RES (11)..(11): (S)-3-amino-1-((pent-4-en-1-yloxy)carbonyl)pyrrolidine-3- carboxylic acid
  MOD_RES (12)..(12): (S)-2-amino-3-(thiophen-3-yl)propanoic acid
  MOD_RES (13)..(13): (S)-2-amino-3-(benzo[b]thiophen-3-yl)propanoic acid
  C-term amino
XDXXDDAAFLXXXN

SEQ ID NO: 1143 - protein, 14 aa, Artificial Sequence
  Description of Artificial Sequence: Synthetic peptide
  N-term Acetic Acid
  MOD_RES (1)..(1): (R)-2-allylpyrrolidine-2-carboxylic acid
  MOD_RES (3)..(3): (S)-2-amino-4,4-dimethylpentanoic acid
  MOD_RES (4)..(4): 2-amino-2-(pent-4-en-1-yl)hept-6-enoic acid
  MOD_RES (11)..(11): (S)-3-amino-1-((pent-4-en-1-yloxy)carbonyl)pyrrolidine-3- carboxylic acid
  MOD_RES (12)..(12): (S)-2-amino-3-(thiophen-3-yl)propanoic acid
  MOD_RES (13)..(13): (S)-2-amino-3-(benzo[b]thiophen-3-yl)propanoic acid
  C-term amino
XDXXDDAAFLXXXS

SEQ ID NO: 1144 - protein, 14 aa, Artificial Sequence
  Description of Artificial Sequence: Synthetic peptide
  N-term Acetic Acid
  MOD_RES (1)..(1): (R)-2-allylpyrrolidine-2-carboxylic acid
  MOD_RES (3)..(3): (S)-2-amino-4,4-dimethylpentanoic acid
  MOD_RES (4)..(4): 2-amino-2-(pent-4-en-1-yl)hept-6-enoic acid
  MOD_RES (11)..(11): (S)-3-amino-1-((pent-4-en-1-yloxy)carbonyl)pyrrolidine-3- carboxylic acid
  MOD_RES (12)..(12): (S)-2-amino-3-(thiophen-3-yl)propanoic acid
  MOD_RES (13)..(13): (S)-2-amino-3-(benzo[b]thiophen-3-yl)propanoic acid
  C-term amino
XDXXDDAAFLXXXT

SEQ ID NO: 1145 - protein, 14 aa, Artificial Sequence
  Description of Artificial Sequence: Synthetic peptide
  N-term Acetic Acid
  MOD_RES (1)..(1): (R)-2-allylpyrrolidine-2-carboxylic acid
  MOD_RES (3)..(3): (S)-2-amino-4,4-dimethylpentanoic acid
  MOD_RES (4)..(4): 2-amino-2-(pent-4-en-1-yl)hept-6-enoic acid
  MOD_RES (11)..(11): (S)-3-amino-1-((pent-4-en-1-yloxy)carbonyl)pyrrolidine-3- carboxylic acid
  MOD_RES (12)..(12): (S)-2-amino-3-(thiophen-3-yl)propanoic acid
  MOD_RES (13)..(13): (S)-2-amino-3-(benzo[b]thiophen-3-yl)propanoic acid
  C-term amino
XDXXDDAAFLXXXV

SEQ ID NO: 1146 - protein, 14 aa, Artificial Sequence
  Description of Artificial Sequence: Synthetic peptide
  N-term Acetic Acid
  MOD_RES (1)..(1): (R)-2-allylpyrrolidine-2-carboxylic acid
  MOD_RES (3)..(3): (S)-2-amino-4,4-dimethylpentanoic acid
  MOD_RES (4)..(4): 2-amino-2-(pent-4-en-1-yl)hept-6-enoic acid
  MOD_RES (11)..(11): (S)-3-amino-1-((pent-4-en-1-yloxy)carbonyl)pyrrolidine-3- carboxylic acid
  MOD_RES (12)..(12): (S)-2-amino-3-(thiophen-3-yl)propanoic acid
  MOD_RES (13)..(13): (S)-2-amino-3-(benzo[b]thiophen-3-yl)propanoic acid
  C-term amino
XDXXDDAAFLXXXF

SEQ ID NO: 1147 - protein, 14 aa, Artificial Sequence
  Description of Artificial Sequence: Synthetic peptide
  N-term Acetic Acid
  MOD_RES (1)..(1): (R)-2-allylpyrrolidine-2-carboxylic acid
  MOD_RES (3)..(3): (S)-2-amino-4,4-dimethylpentanoic acid
  MOD_RES (4)..(4): 2-amino-2-(pent-4-en-1-yl)hept-6-enoic acid
  MOD_RES (11)..(11): (S)-3-amino-1-((pent-4-en-1-yloxy)carbonyl)pyrrolidine-3- carboxylic acid
  MOD_RES (12)..(12): (S)-2-amino-3-(thiophen-3-yl)propanoic acid
  MOD_RES (13)..(13): (S)-2-amino-3-(benzo[b]thiophen-3-yl)propanoic acid
  C-term amino
XDXXDDAAFLXXXW

SEQ ID NO: 1148 - protein, 14 aa, Artificial Sequence
  Description of Artificial Sequence: Synthetic peptide
  N-term Acetic Acid
  MOD_RES (1)..(1): (R)-2-allylpyrrolidine-2-carboxylic acid
  MOD_RES (3)..(3): (S)-2-amino-4,4-dimethylpentanoic acid
  MOD_RES (4)..(4): 2-amino-2-(pent-4-en-1-yl)hept-6-enoic acid
  MOD_RES (11)..(11): (S)-3-amino-1-((pent-4-en-1-yloxy)carbonyl)pyrrolidine-3- carboxylic acid
  MOD_RES (12)..(12): (S)-2-amino-3-(thiophen-3-yl)propanoic acid
  MOD_RES (13)..(13): (S)-2-amino-3-(benzo[b]thiophen-3-yl)propanoic acid
  MOD_RES (14)..(14): (S)-2-amino-3-(1H-1,2,3-triazol-4-yl)propanoic acid
  C-term amino
XDXXDDAAFLXXXX

SEQ ID NO: 1149 - protein, 14 aa, Artificial Sequence
  Description of Artificial Sequence: Synthetic peptide
  N-term Acetic Acid
  MOD_RES (1)..(1): (R)-2-allylpyrrolidine-2-carboxylic acid
  MOD_RES (3)..(3): (S)-2-amino-4,4-dimethylpentanoic acid
  MOD_RES (4)..(4): 2-amino-2-(pent-4-en-1-yl)hept-6-enoic acid
  MOD_RES (11)..(11): (S)-3-amino-1-((pent-4-en-1-yloxy)carbonyl)pyrrolidine-3- carboxylic acid
  MOD_RES (12)..(12): (S)-2-amino-3-(thiophen-3-yl)propanoic acid
  MOD_RES (13)..(13): (S)-2-amino-3-(benzo[b]thiophen-3-yl)propanoic acid
  MOD_RES (14)..(14): L-homoserine
  C-term amino
XDXXDDAAFLXXXS

SEQ ID NO: 1150 - protein, 14 aa, Artificial Sequence
  Description of Artificial Sequence: Synthetic peptide
  N-term Acetic Acid
  MOD_RES (1)..(1): (R)-2-allylpyrrolidine-2-carboxylic acid
  MOD_RES (3)..(3): (S)-2-amino-4,4-dimethylpentanoic acid
  MOD_RES (4)..(4): 2-amino-2-(pent-4-en-1-yl)hept-6-enoic acid
  MOD_RES (11)..(11): (S)-3-amino-1-((pent-4-en-1-yloxy)carbonyl)pyrrolidine-3- carboxylic acid
  MOD_RES (12)..(12): (S)-2-amino-3-(thiophen-3-yl)propanoic acid
  MOD_RES (13)..(13): (S)-2-amino-3-(benzo[b]thiophen-3-yl)propanoic acid
  MOD_RES (14)..(14): D-glutamine
  C-term amino
XDXXDDAAFLXXXQ

SEQ ID NO: 1151 - protein, 14 aa, Artificial Sequence
  Description of Artificial Sequence: Synthetic peptide
  N-term Acetic Acid
  MOD_RES (1)..(1): (R)-2-allylpyrrolidine-2-carboxylic acid
  MOD_RES (3)..(3): (S)-2-amino-4,4-dimethylpentanoic acid
  MOD_RES (4)..(4): 2-amino-2-(pent-4-en-1-yl)hept-6-enoic acid
  MOD_RES (8)..(8): (S)-2-amino-5-morpholinopentanoic acid
  MOD_RES (11)..(11): (S)-3-amino-1-((pent-4-en-1-yloxy)carbonyl)pyrrolidine-3- carboxylic acid
  MOD_RES (12)..(12): (S)-2-amino-3-(thiophen-3-yl)propanoic acid
  MOD_RES (13)..(13): (S)-2-amino-3-(benzo[b]thiophen-3-yl)propanoic acid
  C-term amino
XDXXDDAXFLXXXQ

SEQ ID NO: 1152 - protein, 14 aa, Artificial Sequence
  Description of Artificial Sequence: Synthetic peptide
  N-term Acetic Acid
  MOD_RES (1)..(1): (R)-2-allylpyrrolidine-2-carboxylic acid
  MOD_RES (3)..(3): (S)-2-amino-4,4-dimethylpentanoic acid
  MOD_RES (4)..(4): 2-amino-2-(pent-4-en-1-yl)hept-6-enoic acid
  MOD_RES (8)..(8): (S)-2-amino-5-(4,4-difluoropiperidin-1-yl)pentanoic acid
  MOD_RES (11)..(11): (S)-3-amino-1-((pent-4-en-1-yloxy)carbonyl)pyrrolidine-3- carboxylic acid
  MOD_RES (12)..(12): (S)-2-amino-3-(thiophen-3-yl)propanoic acid
  MOD_RES (13)..(13): (S)-2-amino-3-(benzo[b]thiophen-3-yl)propanoic acid
  C-term amino
XDXXDDAXFLXXXQ

SEQ ID NO: 1153 - protein, 14 aa, Artificial Sequence
  Description of Artificial Sequence: Synthetic peptide
  N-term Acetic Acid
  MOD_RES (1)..(1): (R)-2-allylpyrrolidine-2-carboxylic acid
  MOD_RES (3)..(3): (S)-2-amino-4,4-dimethylpentanoic acid
  MOD_RES (4)..(4): 2-amino-2-(pent-4-en-1-yl)hept-6-enoic acid
  MOD_RES (8)..(8): (S)-2-amino-5-(4-methylpiperazin-1-yl)pentanoic acid
  MOD_RES (11)..(11): (S)-3-amino-1-((pent-4-en-1-yloxy)carbonyl)pyrrolidine-3- carboxylic acid
  MOD_RES (12)..(12): (S)-2-amino-3-(thiophen-3-yl)propanoic acid
  MOD_RES (13)..(13): (S)-2-amino-3-(benzo[b]thiophen-3-yl)propanoic acid
  C-term amino
XDXXDDAXFLXXXQ

SEQ ID NO: 1154 - protein, 14 aa, Artificial Sequence
  Description of Artificial Sequence: Synthetic peptide
  N-term Acetic Acid
  MOD_RES (1)..(1): (R)-2-allylpyrrolidine-2-carboxylic acid
  MOD_RES (3)..(3): (S)-2-amino-4,4-dimethylpentanoic acid
  MOD_RES (4)..(4): 2-amino-2-(pent-4-en-1-yl)hept-6-enoic acid
  MOD_RES (8)..(8): (S)-2-amino-4-morpholinobutanoic acid
  MOD_RES (11)..(11): (S)-3-amino-1-((pent-4-en-1-yloxy)carbonyl)pyrrolidine-3- carboxylic acid
  MOD_RES (12)..(12): (S)-2-amino-3-(thiophen-3-yl)propanoic acid
  MOD_RES (13)..(13): (S)-2-amino-3-(benzo[b]thiophen-3-yl)propanoic acid
  C-term amino
XDXXDDAXFLXXXQ

SEQ ID NO: 1155 - protein, 14 aa, Artificial Sequence
  Description of Artificial Sequence: Synthetic peptide
  N-term Acetic Acid
  MOD_RES (1)..(1): (R)-2-allylpyrrolidine-2-carboxylic acid
  MOD_RES (3)..(3): (S)-2-amino-4,4-dimethylpentanoic acid
  MOD_RES (4)..(4): 2-amino-2-(pent-4-en-1-yl)hept-6-enoic acid
  MOD_RES (8)..(8): (S)-2-amino-4-(4,4-difluoropiperidin-1-yl)butanoic acid
  MOD_RES (11)..(11): (S)-3-amino-1-((pent-4-en-1-yloxy)carbonyl)pyrrolidine-3- carboxylic acid
  MOD_RES (12)..(12): (S)-2-amino-3-(thiophen-3-yl)propanoic acid
  MOD_RES (13)..(13): (S)-2-amino-3-(benzo[b]thiophen-3-yl)propanoic acid
  C-term amino
XDXXDDAXFLXXXQ

SEQ ID NO: 1156 - protein, 14 aa, Artificial Sequence
  Description of Artificial Sequence: Synthetic peptide
  N-term Acetic Acid
  MOD_RES (1)..(1): (R)-2-allylpyrrolidine-2-carboxylic acid
  MOD_RES (3)..(3): (S)-2-amino-4,4-dimethylpentanoic acid
  MOD_RES (4)..(4): 2-amino-2-(pent-4-en-1-yl)hept-6-enoic acid
  MOD_RES (8)..(8): (S)-2-amino-4-(4-methylpiperazin-1-yl)butanoic acid
  MOD_RES (11)..(11): (S)-3-amino-1-((pent-4-en-1-yloxy)carbonyl)pyrrolidine-3- carboxylic acid
  MOD_RES (12)..(12): (S)-2-amino-3-(thiophen-3-yl)propanoic acid
  MOD_RES (13)..(13): (S)-2-amino-3-(benzo[b]thiophen-3-yl)propanoic acid
  C-term amino
XDXXDDAXFLXXXQ

SEQ ID NO: 1157 - protein, 14 aa, Artificial Sequence
  Description of Artificial Sequence: Synthetic peptide
  N-term Acetic Acid
  MOD_RES (1)..(1): (R)-2-allylpyrrolidine-2-carboxylic acid
  MOD_RES (3)..(3): (S)-2-amino-4,4-dimethylpentanoic acid
  MOD_RES (4)..(4): 2-amino-2-(pent-4-en-1-yl)hept-6-enoic acid
  MOD_RES (8)..(8): (S)-2-amino-4-morpholino-4-oxobutanoic acid
  MOD_RES (11)..(11): (S)-3-amino-1-((pent-4-en-1-yloxy)carbonyl)pyrrolidine-3- carboxylic acid
  MOD_RES (12)..(12): (S)-2-amino-3-(thiophen-3-yl)propanoic acid
  MOD_RES (13)..(13): (S)-2-amino-3-(benzo[b]thiophen-3-yl)propanoic acid
  C-term amino
XDXXDDAXFLXXXQ

SEQ ID NO: 1158 - protein, 14 aa, Artificial Sequence
  Description of Artificial Sequence: Synthetic peptide
  N-term Acetic Acid
  MOD_RES (1)..(1): (R)-2-allylpyrrolidine-2-carboxylic acid
  MOD_RES (3)..(3): (S)-2-amino-4,4-dimethylpentanoic acid
  MOD_RES (4)..(4): 2-amino-2-(pent-4-en-1-yl)hept-6-enoic acid
  MOD_RES (8)..(8): (S)-2-amino-4-(4-methylpiperazin-1-yl)-4-oxobutanoic acid
  MOD_RES (11)..(11): (S)-3-amino-1-((pent-4-en-1-yloxy)carbonyl)pyrrolidine-3- carboxylic acid
  MOD_RES (12)..(12): (S)-2-amino-3-(thiophen-3-yl)propanoic acid
  MOD_RES (13)..(13): (S)-2-amino-3-(benzo[b]thiophen-3-yl)propanoic acid
  C-term amino
XDXXDDAXFLXXXQ

SEQ ID NO: 1159 - protein, 14 aa, Artificial Sequence
  Description of Artificial Sequence: Synthetic peptide
  N-term Acetic Acid
  MOD_RES (1)..(1): (R)-2-allylpyrrolidine-2-carboxylic acid
  MOD_RES (4)..(4): 2-amino-2-(pent-4-en-1-yl)hept-6-enoic acid
  MOD_RES (11)..(11): (S)-3-amino-1-((pent-4-en-1-yloxy)carbonyl)pyrrolidine-3- carboxylic acid
  MOD_RES (12)..(12): (S)-2-amino-3-(thiophen-3-yl)propanoic acid
  MOD_RES (13)..(13): (S)-2-amino-3-(benzo[b]thiophen-3-yl)propanoic acid
  C-term amino
XDFXDDAAFLXXXQ

SEQ ID NO: 1160 - protein, 14 aa, Artificial Sequence
  Description of Artificial Sequence: Synthetic peptide
  N-term Acetic Acid
  MOD_RES (1)..(1): (R)-2-allylpyrrolidine-2-carboxylic acid
  MOD_RES (4)..(4): 2-amino-2-(pent-4-en-1-yl)hept-6-enoic acid
  MOD_RES (11)..(11): (S)-3-amino-1-((pent-4-en-1-yloxy)carbonyl)pyrrolidine-3- carboxylic acid
  MOD_RES (12)..(12): (S)-2-amino-3-(thiophen-3-yl)propanoic acid
  MOD_RES (13)..(13): (S)-2-amino-3-(benzo[b]thiophen-3-yl)propanoic acid
  MOD_RES (14)..(14): L-homoserine
  C-term amino
XDFXDDAAFLXXXS

SEQ ID NO: 1161 - protein, 14 aa, Artificial Sequence
  Description of Artificial Sequence: Synthetic peptide
  N-term Acetic Acid
  MOD_RES (1)..(1): (R)-2-allylpyrrolidine-2-carboxylic acid
  MOD_RES (4)..(4): 2-amino-2-(pent-4-en-1-yl)hept-6-enoic acid
  MOD_RES (11)..(11): (S)-3-amino-1-((pent-4-en-1-yloxy)carbonyl)pyrrolidine-3- carboxylic acid
  MOD_RES (12)..(12): (S)-2-amino-3-(thiophen-3-yl)propanoic acid
  MOD_RES (13)..(13): (S)-2-amino-3-(benzo[b]thiophen-3-yl)propanoic acid
  C-term amino
XDYXDDAAFLXXXQ

SEQ ID NO: 1162 - protein, 14 aa, Artificial Sequence
  Description of Artificial Sequence: Synthetic peptide
  N-term Acetic Acid
  MOD_RES (1)..(1): (R)-2-allylpyrrolidine-2-carboxylic acid
  MOD_RES (4)..(4): 2-amino-2-(pent-4-en-1-yl)hept-6-enoic acid
  MOD_RES (11)..(11): (S)-3-amino-1-((pent-4-en-1-yloxy)carbonyl)pyrrolidine-3- carboxylic acid
  MOD_RES (12)..(12): (S)-2-amino-3-(thiophen-3-yl)propanoic acid
  MOD_RES (13)..(13): (S)-2-amino-3-(benzo[b]thiophen-3-yl)propanoic acid
  MOD_RES (14)..(14): L-homoserine
  C-term amino
XDYXDDAAFLXXXS

SEQ ID NO: 1163 - protein, 14 aa, Artificial Sequence
  Description of Artificial Sequence: Synthetic peptide
  N-term Acetic Acid
  MOD_RES (1)..(1): (R)-2-allylpyrrolidine-2-carboxylic acid
  MOD_RES (4)..(4): 2-amino-2-(pent-4-en-1-yl)hept-6-enoic acid
  MOD_RES (11)..(11): (S)-3-amino-1-((pent-4-en-1-yloxy)carbonyl)pyrrolidine-3- carboxylic acid
  MOD_RES (12)..(12): (S)-2-amino-3-(thiophen-3-yl)propanoic acid
  MOD_RES (13)..(13): (S)-2-amino-3-(benzo[b]thiophen-3-yl)propanoic acid
  C-term amino
XDSXDDAAFLXXXQ

SEQ ID NO: 1164 - protein, 14 aa, Artificial Sequence
  Description of Artificial Sequence: Synthetic peptide
  N-term Acetic Acid
  MOD_RES (1)..(1): (R)-2-allylpyrrolidine-2-carboxylic acid
  MOD_RES (4)..(4): 2-amino-2-(pent-4-en-1-yl)hept-6-enoic acid
  MOD_RES (11)..(11): (S)-3-amino-1-((pent-4-en-1-yloxy)carbonyl)pyrrolidine-3- carboxylic acid
  MOD_RES (12)..(12): (S)-2-amino-3-(thiophen-3-yl)propanoic acid
  MOD_RES (13)..(13): (S)-2-amino-3-(benzo[b]thiophen-3-yl)propanoic acid
  MOD_RES (14)..(14): L-homoserine
  C-term amino
XDSXDDAAFLXXXS

SEQ ID NO: 1165 - protein, 14 aa, Artificial Sequence
  Description of Artificial Sequence: Synthetic peptide
  N-term Acetic Acid
  MOD_RES (1)..(1): (R)-2-allylpyrrolidine-2-carboxylic acid
  MOD_RES (4)..(4): 2-amino-2-(pent-4-en-1-yl)hept-6-enoic acid
  MOD_RES (11)..(11): (S)-3-amino-1-((pent-4-en-1-yloxy)carbonyl)pyrrolidine-3- carboxylic acid
  MOD_RES (12)..(12): (S)-2-amino-3-(thiophen-3-yl)propanoic acid
  MOD_RES (13)..(13): (S)-2-amino-3-(benzo[b]thiophen-3-yl)propanoic acid
  C-term amino
XDTXDDAAFLXXXQ

SEQ ID NO: 1166 - protein, 14 aa, Artificial Sequence
  Description of Artificial Sequence: Synthetic peptide
  N-term Acetic Acid
  MOD_RES (1)..(1): (R)-2-allylpyrrolidine-2-carboxylic acid
  MOD_RES (4)..(4): 2-amino-2-(pent-4-en-1-yl)hept-6-enoic acid
  MOD_RES (11)..(11): (S)-3-amino-1-((pent-4-en-1-yloxy)carbonyl)pyrrolidine-3- carboxylic acid
  MOD_RES (12)..(12): (S)-2-amino-3-(thiophen-3-yl)propanoic acid
  MOD_RES (13)..(13): (S)-2-amino-3-(benzo[b]thiophen-3-yl)propanoic acid
  MOD_RES (14)..(14): L-homoserine
  C-term amino
XDTXDDAAFLXXXS

SEQ ID NO: 1167 - protein, 14 aa, Artificial Sequence
  Description of Artificial Sequence: Synthetic peptide
  N-term Acetic Acid
  MOD_RES (1)..(1): (R)-2-allylpyrrolidine-2-carboxylic acid
  MOD_RES (4)..(4): 2-amino-2-(pent-4-en-1-yl)hept-6-enoic acid
  MOD_RES (11)..(11): (S)-3-amino-1-((pent-4-en-1-yloxy)carbonyl)pyrrolidine-3- carboxylic acid
  MOD_RES (12)..(12): (S)-2-amino-3-(thiophen-3-yl)propanoic acid
  MOD_RES (13)..(13): (S)-2-amino-3-(benzo[b]thiophen-3-yl)propanoic acid
  C-term amino
XDNXDDAAFLXXXQ

SEQ ID NO: 1168 - protein, 14 aa, Artificial Sequence
  Description of Artificial Sequence: Synthetic peptide
  N-term Acetic Acid
  MOD_RES (1)..(1): (R)-2-allylpyrrolidine-2-carboxylic acid
  MOD_RES (4)..(4): 2-amino-2-(pent-4-en-1-yl)hept-6-enoic acid
  MOD_RES (11)..(11): (S)-3-amino-1-((pent-4-en-1-yloxy)carbonyl)pyrrolidine-3- carboxylic acid
  MOD_RES (12)..(12): (S)-2-amino-3-(thiophen-3-yl)propanoic acid
  MOD_RES (13)..(13): (S)-2-amino-3-(benzo[b]thiophen-3-yl)propanoic acid
  MOD_RES (14)..(14): L-homoserine
  C-term amino
XDNXDDAAFLXXXS

SEQ ID NO: 1169 - protein, 14 aa, Artificial Sequence
  Description of Artificial Sequence: Synthetic peptide
  N-term Acetic Acid
  MOD_RES (1)..(1): (R)-2-allylpyrrolidine-2-carboxylic acid
  MOD_RES (3)..(3): (S)-2-amino-3-cyclohexylpropanoic acid
  MOD_RES (4)..(4): 2-amino-2-(pent-4-en-1-yl)hept-6-enoic acid
  MOD_RES (11)..(11): (S)-3-amino-1-((pent-4-en-1-yloxy)carbonyl)pyrrolidine-3- carboxylic acid
  MOD_RES (12)..(12): (S)-2-amino-3-(thiophen-3-yl)propanoic acid
  MOD_RES (13)..(13): (S)-2-amino-3-(benzo[b]thiophen-3-yl)propanoic acid
  C-term amino
XDXXDDAAFLXXXQ

SEQ ID NO: 1170 - protein, 14 aa, Artificial Sequence
  Description of Artificial Sequence: Synthetic peptide
  N-term Acetic Acid
  MOD_RES (1)..(1): (R)-2-allylpyrrolidine-2-carboxylic acid
  MOD_RES (3)..(3): (S)-2-amino-3-cyclohexylpropanoic acid
  MOD_RES (4)..(4): 2-amino-2-(pent-4-en-1-yl)hept-6-enoic acid
  MOD_RES (11)..(11): (S)-3-amino-1-((pent-4-en-1-yloxy)carbonyl)pyrrolidine-3- carboxylic acid
  MOD_RES (12)..(12): (S)-2-amino-3-(thiophen-3-yl)propanoic acid
  MOD_RES (13)..(13): (S)-2-amino-3-(benzo[b]thiophen-3-yl)propanoic acid
  MOD_RES (14)..(14): L-homoserine
  C-term amino
XDXXDDAAFLXXXS

SEQ ID NO: 1171 - protein, 14 aa, Artificial Sequence
  Description of Artificial Sequence: Synthetic peptide
  N-term Acetic Acid
  MOD_RES (1)..(1): (R)-2-allylpyrrolidine-2-carboxylic acid
  MOD_RES (3)..(3): (S)-2-aminohexanoic acid
  MOD_RES (4)..(4): 2-amino-2-(pent-4-en-1-yl)hept-6-enoic acid
  MOD_RES (11)..(11): (S)-2-amino-2-methyldec-9-enoic acid
  MOD_RES (13)..(13): (S)-2-amino-3-(benzo[b]thiophen-3-yl)propanoic acid
  C-term amino
XDXXDEAAFQXFXQ

SEQ ID NO: 1172 - protein, 14 aa, Artificial Sequence
  Description of Artificial Sequence: Synthetic peptide
  N-term Acetic Acid
  MOD_RES (1)..(1): (R)-2-allylpyrrolidine-2-carboxylic acid
  MOD_RES (3)..(3): (S)-2-aminohexanoic acid
  MOD_RES (4)..(4): 2-amino-2-(pent-4-en-1-yl)hept-6-enoic acid
  MOD_RES (11)..(11): (S)-2-amino-2-methyldec-9-enoic acid
  MOD_RES (13)..(13): (S)-2-amino-3-(benzo[b]thiophen-3-yl)propanoic acid
  C-term amino
XDXXDEAAFLXFXQ

SEQ ID NO: 1173 - protein, 14 aa, Artificial Sequence
  Description of Artificial Sequence: Synthetic peptide
  N-term Acetic Acid
  MOD_RES (1)..(1): (R)-2-allylpyrrolidine-2-carboxylic acid
  MOD_RES (3)..(3): (S)-2-aminohexanoic acid
  MOD_RES (4)..(4): 2-amino-2-(pent-4-en-1-yl)hept-6-enoic acid
  MOD_RES (10)..(10): L-homoserine
  MOD_RES (11)..(11): (S)-2-amino-2-methyldec-9-enoic acid
  MOD_RES (13)..(13): (S)-2-amino-3-(benzo[b]thiophen-3-yl)propanoic acid
  C-term amino
XDXXDEAAFSXFXQ

SEQ ID NO: 1174 - protein, 14 aa, Artificial Sequence
  Description of Artificial Sequence: Synthetic peptide
  N-term Acetic Acid
  MOD_RES (1)..(1): (R)-2-allylpyrrolidine-2-carboxylic acid
  MOD_RES (4)..(4): 2-amino-2-(pent-4-en-1-yl)hept-6-enoic acid
  MOD_RES (11)..(11): (S)-2-amino-2-methyldec-9-enoic acid
  MOD_RES (13)..(13): (S)-2-amino-3-(benzo[b]thiophen-3-yl)propanoic acid
  C-term amino
XDSXDEAAFQXFXQ

SEQ ID NO: 1175 - protein, 14 aa, Artificial Sequence
  Description of Artificial Sequence: Synthetic peptide
  N-term Acetic Acid
  MOD_RES (1)..(1): (R)-2-allylpyrrolidine-2-carboxylic acid
  MOD_RES (4)..(4): 2-amino-2-(pent-4-en-1-yl)hept-6-enoic acid
  MOD_RES (11)..(11): (S)-2-amino-2-methyldec-9-enoic acid
  MOD_RES (13)..(13): (S)-2-amino-3-(benzo[b]thiophen-3-yl)propanoic acid
  C-term amino
XDSXDEAAFLXFXQ

SEQ ID NO: 1176 - protein, 14 aa, Artificial Sequence
  Description of Artificial Sequence: Synthetic peptide
  N-term Acetic Acid
  MOD_RES (1)..(1): (R)-2-allylpyrrolidine-2-carboxylic acid
  MOD_RES (4)..(4): 2-amino-2-(pent-4-en-1-yl)hept-6-enoic acid
  MOD_RES (10)..(10): L-homoserine
  MOD_RES (11)..(11): (S)-2-amino-2-methyldec-9-enoic acid
  MOD_RES (13)..(13): (S)-2-amino-3-(benzo[b]thiophen-3-yl)propanoic acid
  C-term amino
XDSXDEAAFSXFXQ

SEQ ID NO: 1177 - protein, 14 aa, Artificial Sequence
  Description of Artificial Sequence: Synthetic peptide
  N-term Acetic Acid
  MOD_RES (1)..(1): (R)-2-allylpyrrolidine-2-carboxylic acid
  MOD_RES (4)..(4): 2-amino-2-(pent-4-en-1-yl)hept-6-enoic acid
  MOD_RES (11)..(11): (S)-2-amino-2-methyldec-9-enoic acid
  MOD_RES (13)..(13): (S)-2-amino-3-(benzo[b]thiophen-3-yl)propanoic acid
  C-term amino
XDNXDEAAFQXFXQ

SEQ ID NO: 1178 - protein, 14 aa, Artificial Sequence
  Description of Artificial Sequence: Synthetic peptide
  N-term Acetic Acid
  MOD_RES (1)..(1): (R)-2-allylpyrrolidine-2-carboxylic acid
  MOD_RES (4)..(4): 2-amino-2-(pent-4-en-1-yl)hept-6-enoic acid
  MOD_RES (11)..(11): (S)-2-amino-2-methyldec-9-enoic acid
  MOD_RES (13)..(13): (S)-2-amino-3-(benzo[b]thiophen-3-yl)propanoic acid
  C-term amino
XDNXDEAAFLXFXQ

SEQ ID NO: 1179 - protein, 14 aa, Artificial Sequence
  Description of Artificial Sequence: Synthetic peptide
  N-term Acetic Acid
  MOD_RES (1)..(1): (R)-2-allylpyrrolidine-2-carboxylic acid
  MOD_RES (4)..(4): 2-amino-2-(pent-4-en-1-yl)hept-6-enoic acid
  MOD_RES (10)..(10): L-homoserine
  MOD_RES (11)..(11): (S)-2-amino-2-methyldec-9-enoic acid
  MOD_RES (13)..(13): (S)-2-amino-3-(benzo[b]thiophen-3-yl)propanoic acid
  C-term amino
XDNXDEAAFSXFXQ

SEQ ID NO: 1180 - protein, 14 aa, Artificial Sequence
  Description of Artificial Sequence: Synthetic peptide
  N-term Acetic Acid
  MOD_RES (1)..(1): (R)-2-allylpyrrolidine-2-carboxylic acid
  MOD_RES (3)..(3): (S)-2-amino-5-methylhexanoic acid
  MOD_RES (4)..(4): 2-amino-2-(pent-4-en-1-yl)hept-6-enoic acid
  MOD_RES (11)..(11): (S)-2-amino-2-methyldec-9-enoic acid
  MOD_RES (13)..(13): (S)-2-amino-3-(benzo[b]thiophen-3-yl)propanoic acid
  C-term amino
XDXXDEAAFLXFXQ

SEQ ID NO: 1181 - protein, 14 aa, Artificial Sequence
  Description of Artificial Sequence: Synthetic peptide
  N-term Acetic Acid
  MOD_RES (1)..(1): (R)-2-allylpyrrolidine-2-carboxylic acid
  MOD_RES (3)..(3): (S)-2-amino-5-methylhexanoic acid
  MOD_RES (4)..(4): 2-amino-2-(pent-4-en-1-yl)hept-6-enoic acid
  MOD_RES (10)..(10): L-homoserine
  MOD_RES (11)..(11): (S)-2-amino-2-methyldec-9-enoic acid
  MOD_RES (13)..(13): (S)-2-amino-3-(benzo[b]thiophen-3-yl)propanoic acid
  C-term amino
XDXXDEAAFSXFXQ

SEQ ID NO: 1182 - protein, 14 aa, Artificial Sequence
  Description of Artificial Sequence: Synthetic peptide
  N-term Acetic Acid
  MOD_RES (1)..(1): (R)-2-allylpyrrolidine-2-carboxylic acid
  MOD_RES (4)..(4): 2-amino-2-(pent-4-en-1-yl)hept-6-enoic acid
  MOD_RES (11)..(11): (S)-2-amino-2-methyldec-9-enoic acid
  MOD_RES (13)..(13): (S)-2-amino-3-(benzo[b]thiophen-3-yl)propanoic acid
  C-term amino
XDQXDEAAFQXFXQ

SEQ ID NO: 1183 - protein, 14 aa, Artificial Sequence
  Description of Artificial Sequence: Synthetic peptide
  N-term Acetic Acid
  MOD_RES (1)..(1): (R)-2-allylpyrrolidine-2-carboxylic acid
  MOD_RES (4)..(4): 2-amino-2-(pent-4-en-1-yl)hept-6-enoic acid
  MOD_RES (11)..(11): (S)-2-amino-2-methyldec-9-enoic acid
  MOD_RES (13)..(13): (S)-2-amino-3-(benzo[b]thiophen-3-yl)propanoic acid
  C-term amino
XDQXDEAAFLXFXQ

SEQ ID NO: 1184 - protein, 14 aa, Artificial Sequence
  Description of Artificial Sequence: Synthetic peptide
  N-term Acetic Acid
  MOD_RES (1)..(1): (R)-2-allylpyrrolidine-2-carboxylic acid
  MOD_RES (4)..(4): 2-amino-2-(pent-4-en-1-yl)hept-6-enoic acid
  MOD_RES (10)..(10): L-homoserine
  MOD_RES (11)..(11): (S)-2-amino-2-methyldec-9-enoic acid
  MOD_RES (13)..(13): (S)-2-amino-3-(benzo[b]thiophen-3-yl)propanoic acid
  C-term amino
XDQXDEAAFSXFXQ

SEQ ID NO: 1185 - protein, 14 aa, Artificial Sequence
  Description of Artificial Sequence: Synthetic peptide
  N-term Acetic Acid
  MOD_RES (1)..(1): (R)-2-allylpyrrolidine-2-carboxylic acid
  MOD_RES (3)..(3): L-homoserine
  MOD_RES (4)..(4): 2-amino-2-(pent-4-en-1-yl)hept-6-enoic acid
  MOD_RES (11)..(11): (S)-2-amino-2-methyldec-9-enoic acid
  MOD_RES (13)..(13): (S)-2-amino-3-(benzo[b]thiophen-3-yl)propanoic acid
  C-term amino
XDSXDEAAFQXFXQ

SEQ ID NO: 1186 - protein, 14 aa, Artificial Sequence
  Description of Artificial Sequence: Synthetic peptide
  N-term Acetic Acid
  MOD_RES (1)..(1): (R)-2-allylpyrrolidine-2-carboxylic acid
  MOD_RES (3)..(3): L-homoserine
  MOD_RES (4)..(4): 2-amino-2-(pent-4-en-1-yl)hept-6-enoic acid
  MOD_RES (11)..(11): (S)-2-amino-2-methyldec-9-enoic acid
  MOD_RES (13)..(13): (S)-2-amino-3-(benzo[b]thiophen-3-yl)propanoic acid
  C-term amino
XDSXDEAAFLXFXQ

SEQ ID NO: 1187 - protein, 14 aa, Artificial Sequence
  Description of Artificial Sequence: Synthetic peptide
  N-term Acetic Acid
  MOD_RES (1)..(1): (R)-2-allylpyrrolidine-2-carboxylic acid
  MOD_RES (3)..(3): L-homoserine
  MOD_RES (4)..(4): 2-amino-2-(pent-4-en-1-yl)hept-6-enoic acid
  MOD_RES (10)..(10): L-homoserine
  MOD_RES (11)..(11): (S)-2-amino-2-methyldec-9-enoic acid
  MOD_RES (13)..(13): (S)-2-amino-3-(benzo[b]thiophen-3-yl)propanoic acid
  C-term amino
XDSXDEAAFSXFXQ

SEQ ID NO: 1188 - protein, 14 aa, Artificial Sequence
  Description of Artificial Sequence: Synthetic peptide
  N-term Acetic Acid
  MOD_RES (1)..(1): (R)-2-allylpyrrolidine-2-carboxylic acid
  MOD_RES (4)..(4): 2-amino-2-(pent-4-en-1-yl)hept-6-enoic acid
  MOD_RES (11)..(11): (S)-2-amino-2-methyldec-9-enoic acid
  MOD_RES (13)..(13): (S)-2-amino-3-(benzo[b]thiophen-3-yl)propanoic acid
  C-term amino
XDFXDEAAFQXFXQ

SEQ ID NO: 1189 - protein, 14 aa, Artificial Sequence
  Description of Artificial Sequence: Synthetic peptide
  N-term Acetic Acid
  MOD_RES (1)..(1): (R)-2-allylpyrrolidine-2-carboxylic acid
  MOD_RES (4)..(4): 2-amino-2-(pent-4-en-1-yl)hept-6-enoic acid
  MOD_RES (11)..(11): (S)-2-amino-2-methyldec-9-enoic acid
  MOD_RES (13)..(13): (S)-2-amino-3-(benzo[b]thiophen-3-yl)propanoic acid
  C-term amino
XDFXDEAAFLXFXQ

SEQ ID NO: 1190 - protein, 14 aa, Artificial Sequence
  Description of Artificial Sequence: Synthetic peptide
  N-term Acetic Acid
  MOD_RES (1)..(1): (R)-2-allylpyrrolidine-2-carboxylic acid
  MOD_RES (4)..(4): 2-amino-2-(pent-4-en-1-yl)hept-6-enoic acid
  MOD_RES (10)..(10): L-homoserine
  MOD_RES (11)..(11): (S)-2-amino-2-methyldec-9-enoic acid
  MOD_RES (13)..(13): (S)-2-amino-3-(benzo[b]thiophen-3-yl)propanoic acid
  C-term amino
XDFXDEAAFSXFXQ

SEQ ID NO: 1191 - protein, 14 aa, Artificial Sequence
  Description of Artificial Sequence: Synthetic peptide
  N-term Acetic Acid
  MOD_RES (1)..(1): (R)-2-allylpyrrolidine-2-carboxylic acid
  MOD_RES (4)..(4): 2-amino-2-(pent-4-en-1-yl)hept-6-enoic acid
  MOD_RES (11)..(11): (S)-2-amino-2-methyldec-9-enoic acid
  MOD_RES (13)..(13): (S)-2-amino-3-(benzo[b]thiophen-3-yl)propanoic acid
  C-term amino
XDKXDEAAFQXFXQ

SEQ ID NO: 1192 - protein, 14 aa, Artificial Sequence
  Description of Artificial Sequence: Synthetic peptide
  N-term Acetic Acid
  MOD_RES (1)..(1): (R)-2-allylpyrrolidine-2-carboxylic acid
  MOD_RES (4)..(4): 2-amino-2-(pent-4-en-1-yl)hept-6-enoic acid
  MOD_RES (11)..(11): (S)-2-amino-2-methyldec-9-enoic acid
  MOD_RES (13)..(13): (S)-2-amino-3-(benzo[b]thiophen-3-yl)propanoic acid
  C-term amino
XDKXDEAAFLXFXQ

SEQ ID NO: 1193 - protein, 14 aa, Artificial Sequence
  Description of Artificial Sequence: Synthetic peptide
  N-term Acetic Acid
  MOD_RES (1)..(1): (R)-2-allylpyrrolidine-2-carboxylic acid
  MOD_RES (4)..(4): 2-amino-2-(pent-4-en-1-yl)hept-6-enoic acid
  MOD_RES (10)..(10): L-homoserine
  MOD_RES (11)..(11): (S)-2-amino-2-methyldec-9-enoic acid
  MOD_RES (13)..(13): (S)-2-amino-3-(benzo[b]thiophen-3-yl)propanoic acid
  C-term amino
XDKXDEAAFSXFXQ

SEQ ID NO: 1194 - protein, 14 aa, Artificial Sequence
  Description of Artificial Sequence: Synthetic peptide
  N-term Acetic Acid
  MOD_RES (1)..(1): (R)-2-allylpyrrolidine-2-carboxylic acid
  MOD_RES (3)..(3): (S)-2-amino-4,4-dimethylpentanoic acid
  MOD_RES (4)..(4): 2-amino-2-(pent-4-en-1-yl)hept-6-enoic acid
  MOD_RES (11)..(11): (S)-3-amino-1-((pent-4-en-1-yloxy)carbonyl)pyrrolidine-3- carboxylic acid
  MOD_RES (12)..(12): (S)-2-amino-3-(thiophen-3-yl)propanoic acid
  MOD_RES (13)..(13): (S)-2-amino-3-(benzo[b]thiophen-3-yl)propanoic acid
  C-term amino
XDXXNNAAFNXXXQ

SEQ ID NO: 1195 - protein, 14 aa, Artificial Sequence
  Description of Artificial Sequence: Synthetic peptide
  N-term Acetic Acid
  MOD_RES (1)..(1): (R)-2-allylpyrrolidine-2-carboxylic acid
  MOD_RES (4)..(4): 2-amino-2-(pent-4-en-1-yl)hept-6-enoic acid
  MOD_RES (11)..(11): (S)-3-amino-1-((pent-4-en-1-yloxy)carbonyl)pyrrolidine-3- carboxylic acid
  MOD_RES (12)..(12): (S)-2-amino-3-(thiophen-3-yl)propanoic acid
  MOD_RES (13)..(13): (S)-2-amino-3-(benzo[b]thiophen-3-yl)propanoic acid
  C-term amino
XDAXNNAAFNXXXQ

SEQ ID NO: 1196 - protein, 14 aa, Artificial Sequence
  Description of Artificial Sequence: Synthetic peptide
  N-term Acetic Acid
  MOD_RES (1)..(1): (R)-2-allylpyrrolidine-2-carboxylic acid
  MOD_RES (3)..(3): (S)-2-amino-4,4-dimethylpentanoic acid
  MOD_RES (4)..(4): 2-amino-2-(pent-4-en-1-yl)hept-6-enoic acid
  MOD_RES (11)..(11): (S)-3-amino-1-((pent-4-en-1-yloxy)carbonyl)pyrrolidine-3- carboxylic acid
  MOD_RES (12)..(12): (S)-2-amino-3-(thiophen-3-yl)propanoic acid
  MOD_RES (13)..(13): (S)-2-amino-3-(benzo[b]thiophen-3-yl)propanoic acid
  C-term amino
XDXXNNAAFLXXXQ

SEQ ID NO: 1197 - protein, 14 aa, Artificial Sequence
  Description of Artificial Sequence: Synthetic peptide
  N-term Acetic Acid
  MOD_RES (1)..(1): (R)-2-allylpyrrolidine-2-carboxylic acid
  MOD_RES (3)..(3): (S)-2-amino-4,4-dimethylpentanoic acid
  MOD_RES (4)..(4): 2-amino-2-(pent-4-en-1-yl)hept-6-enoic acid
  MOD_RES (11)..(11): (S)-3-amino-1-((pent-4-en-1-yloxy)carbonyl)pyrrolidine-3- carboxylic acid
  MOD_RES (12)..(12): (S)-2-amino-3-(thiophen-3-yl)propanoic acid
  MOD_RES (13)..(13): (S)-2-amino-3-(benzo[b]thiophen-3-yl)propanoic acid
  C-term amino
XDXXQQAAFNXXXQ

SEQ ID NO: 1198 - protein, 14 aa, Artificial Sequence
  Description of Artificial Sequence: Synthetic peptide
  N-term Acetic Acid
  MOD_RES (1)..(1): (R)-2-allylpyrrolidine-2-carboxylic acid
  MOD_RES (3)..(3): (S)-2-amino-4,4-dimethylpentanoic acid
  MOD_RES (4)..(4): 2-amino-2-(pent-4-en-1-yl)hept-6-enoic acid
  MOD_RES (11)..(11): (S)-3-amino-1-((pent-4-en-1-yloxy)carbonyl)pyrrolidine-3- carboxylic acid
  MOD_RES (12)..(12): (S)-2-amino-3-(thiophen-3-yl)propanoic acid
  MOD_RES (13)..(13): (S)-2-amino-3-(benzo[b]thiophen-3-yl)propanoic acid
  C-term amino
XDXXTNAAFNXXXQ

SEQ ID NO: 1199 - protein, 14 aa, Artificial Sequence
  Description of Artificial Sequence: Synthetic peptide
  N-term Acetic Acid
  MOD_RES (1)..(1): (R)-2-allylpyrrolidine-2-carboxylic acid
  MOD_RES (3)..(3): (S)-2-amino-4,4-dimethylpentanoic acid
  MOD_RES (4)..(4): 2-amino-2-(pent-4-en-1-yl)hept-6-enoic acid
  MOD_RES (11)..(11): (S)-3-amino-1-((pent-4-en-1-yloxy)carbonyl)pyrrolidine-3- carboxylic acid
  MOD_RES (12)..(12): (S)-2-amino-3-(thiophen-3-yl)propanoic acid
  MOD_RES (13)..(13): (S)-2-amino-3-(benzo[b]thiophen-3-yl)propanoic acid
  C-term amino
XDXXQNAAFNXXXQ

SEQ ID NO: 1200 - protein, 14 aa, Artificial Sequence
  Description of Artificial Sequence: Synthetic peptide
  N-term Acetic Acid
  MOD_RES (1)..(1): (R)-2-allylpyrrolidine-2-carboxylic acid
  MOD_RES (3)..(3): (S)-2-amino-4,4-dimethylpentanoic acid
  MOD_RES (4)..(4): 2-amino-2-(pent-4-en-1-yl)hept-6-enoic acid
  MOD_RES (11)..(11): (S)-3-amino-1-((pent-4-en-1-yloxy)carbonyl)pyrrolidine-3- carboxylic acid
  MOD_RES (12)..(12): (S)-2-amino-3-(thiophen-3-yl)propanoic acid
  MOD_RES (13)..(13): (S)-2-amino-3-(benzo[b]thiophen-3-yl)propanoic acid
  C-term amino
XDXXSNAAFNXXXQ

SEQ ID NO: 1201 - protein, 14 aa, Artificial Sequence
  Description of Artificial Sequence: Synthetic peptide
  N-term Acetic Acid
  MOD_RES (1)..(1): (R)-2-allylpyrrolidine-2-carboxylic acid
  MOD_RES (3)..(3): (S)-2-amino-4,4-dimethylpentanoic acid
  MOD_RES (4)..(4): 2-amino-2-(pent-4-en-1-yl)hept-6-enoic acid
  MOD_RES (11)..(11): (S)-3-amino-1-((pent-4-en-1-yloxy)carbonyl)pyrrolidine-3- carboxylic acid
  MOD_RES (12)..(12): (S)-2-amino-3-(thiophen-3-yl)propanoic acid
  MOD_RES (13)..(13): (S)-2-amino-3-(benzo[b]thiophen-3-yl)propanoic acid
  C-term amino
XDXXLNAAFNXXXQ

SEQ ID NO: 1202 - protein, 14 aa, Artificial Sequence
  Description of Artificial Sequence: Synthetic peptide
  N-term Acetic Acid
  MOD_RES (1)..(1): (R)-2-allylpyrrolidine-2-carboxylic acid
  MOD_RES (3)..(3): (S)-2-amino-4,4-dimethylpentanoic acid
  MOD_RES (4)..(4): 2-amino-2-(pent-4-en-1-yl)hept-6-enoic acid
  MOD_RES (11)..(11): (S)-3-amino-1-((pent-4-en-1-yloxy)carbonyl)pyrrolidine-3- carboxylic acid
  MOD_RES (12)..(12): (S)-2-amino-3-(thiophen-3-yl)propanoic acid
  MOD_RES (13)..(13): (S)-2-amino-3-(benzo[b]thiophen-3-yl)propanoic acid
  C-term amino
XDXXNTAAFNXXXQ

SEQ ID NO: 1203 - protein, 14 aa, Artificial Sequence
  Description of Artificial Sequence: Synthetic peptide
  N-term Acetic Acid
  MOD_RES (1)..(1): (R)-2-allylpyrrolidine-2-carboxylic acid
  MOD_RES (3)..(3): (S)-2-amino-4,4-dimethylpentanoic acid
  MOD_RES (4)..(4): 2-amino-2-(pent-4-en-1-yl)hept-6-enoic acid
  MOD_RES (11)..(11): (S)-3-amino-1-((pent-4-en-1-yloxy)carbonyl)pyrrolidine-3- carboxylic acid
  MOD_RES (12)..(12): (S)-2-amino-3-(thiophen-3-yl)propanoic acid
  MOD_RES (13)..(13): (S)-2-amino-3-(benzo[b]thiophen-3-yl)propanoic acid
  C-term amino
XDXXNQAAFNXXXQ

SEQ ID NO: 1204 - protein, 14 aa, Artificial Sequence
  Description of Artificial Sequence: Synthetic peptide
  N-term Acetic Acid
  MOD_RES (1)..(1): (R)-2-allylpyrrolidine-2-carboxylic acid
  MOD_RES (3)..(3): (S)-2-amino-4,4-dimethylpentanoic acid
  MOD_RES (4)..(4): 2-amino-2-(pent-4-en-1-yl)hept-6-enoic acid
  MOD_RES (11)..(11): (S)-3-amino-1-((pent-4-en-1-yloxy)carbonyl)pyrrolidine-3- carboxylic acid
  MOD_RES (12)..(12): (S)-2-amino-3-(thiophen-3-yl)propanoic acid
  MOD_RES (13)..(13): (S)-2-amino-3-(benzo[b]thiophen-3-yl)propanoic acid
  C-term amino
XDXXNYAAFNXXXQ

SEQ ID NO: 1205 - protein, 14 aa, Artificial Sequence
  Description of Artificial Sequence: Synthetic peptide
  N-term Acetic Acid
  MOD_RES (1)..(1): (R)-2-allylpyrrolidine-2-carboxylic acid
  MOD_RES (3)..(3): (S)-2-amino-4,4-dimethylpentanoic acid
  MOD_RES (4)..(4): 2-amino-2-(pent-4-en-1-yl)hept-6-enoic acid
  MOD_RES (11)..(11): (S)-3-amino-1-((pent-4-en-1-yloxy)carbonyl)pyrrolidine-3- carboxylic acid
  MOD_RES (12)..(12): (S)-2-amino-3-(thiophen-3-yl)propanoic acid
  MOD_RES (13)..(13): (S)-2-amino-3-(benzo[b]thiophen-3-yl)propanoic acid
  C-term amino
XDXXNLAAFNXXXQ

SEQ ID NO: 1206 - protein, 14 aa, Artificial Sequence
  Description of Artificial Sequence: Synthetic peptide
  N-term Acetic Acid
  MOD_RES (1)..(1): (R)-2-allylpyrrolidine-2-carboxylic acid
  MOD_RES (3)..(3): (S)-2-amino-4,4-dimethylpentanoic acid
  MOD_RES (4)..(4): 2-amino-2-(pent-4-en-1-yl)hept-6-enoic acid
  MOD_RES (6)..(6): (S)-2-amino-3-((carboxymethyl)(3,3,4,4,4-pentafluorobutyl)amino) propanoic acid
  MOD_RES (11)..(11): (S)-3-amino-1-((pent-4-en-1-yloxy)carbonyl)pyrrolidine-3- carboxylic acid
  MOD_RES (12)..(12): (S)-2-amino-3-(2-chlorophenyl)propanoic acid
  MOD_RES (13)..(13): (S)-2-amino-3-(benzo[b]thiophen-3-yl)propanoic acid
  C-term amino
XDXXDXAAFNXFXQ

SEQ ID NO: 1207 - protein, 14 aa, Artificial Sequence
  Description of Artificial Sequence: Synthetic peptide
  N-term Acetic Acid
  MOD_RES (1)..(1): (R)-2-allylpyrrolidine-2-carboxylic acid
  MOD_RES (3)..(3): (S)-2-amino-4,4-dimethylpentanoic acid
  MOD_RES (4)..(4): 2-amino-2-(pent-4-en-1-yl)hept-6-enoic acid
  MOD_RES (6)..(6): (S)-2-amino-3-((carboxymethyl)amino)propanoic acid
  MOD_RES (11)..(11): (S)-3-amino-1-((pent-4-en-1-yloxy)carbonyl)pyrrolidine-3- carboxylic acid
  MOD_RES (12)..(12): (S)-2-amino-3-(2-chlorophenyl)propanoic acid
  MOD_RES (13)..(13): (S)-2-amino-3-(benzo[b]thiophen-3-yl)propanoic acid
  C-term amino
XDXXDXAAFNXFXQ

SEQ ID NO: 1208 - protein, 14 aa, Artificial Sequence
  Description of Artificial Sequence: Synthetic peptide
  N-term Acetic Acid
  MOD_RES (1)..(1): (2R,4S)-4-(pent-4-enoyloxy)pyrrolidine-2-carboxylic acid
  MOD_RES (3)..(3): (S)-2-amino-4,4-dimethylpentanoic acid
  MOD_RES (4)..(4): 2-amino-2-(pent-4-en-1-yl)hept-6-enoic acid
  MOD_RES (11)..(11): (S)-3-amino-1-((pent-4-en-1-yloxy)carbonyl)pyrrolidine-3- carboxylic acid
  MOD_RES (12)..(12): (S)-2-amino-3-(thiophen-3-yl)propanoic acid
  MOD_RES (13)..(13): (S)-2-amino-3-(benzo[b]thiophen-3-yl)propanoic acid
  C-term amino
XDXXDDAAFNXXXQ

SEQ ID NO: 1209 - protein, 14 aa, Artificial Sequence
  Description of Artificial Sequence: Synthetic peptide
  N-term methanesulfonic acid
  MOD_RES (1)..(1): (2R,4S)-4-(pent-4-enoyloxy)pyrrolidine-2-carboxylic acid
  MOD_RES (3)..(3): (S)-2-amino-4,4-dimethylpentanoic acid
  MOD_RES (4)..(4): 2-amino-2-(pent-4-en-1-yl)hept-6-enoic acid
  MOD_RES (11)..(11): (S)-3-amino-1-((pent-4-en-1-yloxy)carbonyl)pyrrolidine-3- carboxylic acid
  MOD_RES (12)..(12): (S)-2-amino-3-(thiophen-3-yl)propanoic acid
  MOD_RES (13)..(13): (S)-2-amino-3-(benzo[b]thiophen-3-yl)propanoic acid
  C-term amino
XDXXDDAAFNXXXQ

SEQ ID NO: 1210 - protein, 14 aa, Artificial Sequence
  Description of Artificial Sequence: Synthetic peptide
  N-term Acetic Acid
  MOD_RES (1)..(1): (2R,4S)-4-(but-3-enoyloxy)pyrrolidine-2-carboxylic acid
  MOD_RES (3)..(3): (S)-2-amino-4,4-dimethylpentanoic acid
  MOD_RES (4)..(4): 2-amino-2-(pent-4-en-1-yl)hept-6-enoic acid
  MOD_RES (11)..(11): (S)-3-amino-1-((pent-4-en-1-yloxy)carbonyl)pyrrolidine-3- carboxylic acid
  MOD_RES (12)..(12): (S)-2-amino-3-(thiophen-3-yl)propanoic acid
  MOD_RES (13)..(13): (S)-2-amino-3-(benzo[b]thiophen-3-yl)propanoic acid
  C-term amino
XDXXDDAAFNXXXQ

SEQ ID NO: 1211 - protein, 14 aa, Artificial Sequence
  Description of Artificial Sequence: Synthetic peptide
  MOD_RES (1)..(1): (allylsulfonyl)-D-proline
  MOD_RES (3)..(3): (S)-2-amino-4,4-dimethylpentanoic acid
  MOD_RES (4)..(4): 2-amino-2-(pent-4-en-1-yl)hept-6-enoic acid
  MOD_RES (11)..(11): (S)-3-amino-1-((pent-4-en-1-yloxy)carbonyl)pyrrolidine-3- carboxylic acid
  MOD_RES (12)..(12): (S)-2-amino-3-(thiophen-3-yl)propanoic acid
  MOD_RES (13)..(13): (S)-2-amino-3-(benzo[b]thiophen-3-yl)propanoic acid
  C-term amino
PDXXDDAAFNXXXQ

SEQ ID NO: 1212 - protein, 14 aa, Artificial Sequence
  Description of Artificial Sequence: Synthetic peptide
  N-term Acetic Acid
  MOD_RES (1)..(1): (R)-2-allylpyrrolidine-2-carboxylic acid
  MOD_RES (3)..(3): (S)-2-amino-4,4-dimethylpentanoic acid
  MOD_RES (4)..(4): 2-amino-2-(pent-4-en-1-yl)hept-6-enoic acid
  MOD_RES (6)..(6): (S)-3-(3-(1H-tetrazol-5-yl)phenyl)-2-aminopropanoic acid
  MOD_RES (11)..(11): (S)-3-amino-1-((pent-4-en-1-yloxy)carbonyl)pyrrolidine-3- carboxylic acid
  MOD_RES (12)..(12): (S)-2-amino-3-(thiophen-3-yl)propanoic acid
  MOD_RES (13)..(13): (S)-2-amino-3-(benzo[b]thiophen-3-yl)propanoic acid
  C-term amino
XDXXDFAAFNXXXQ

SEQ ID NO: 1213 - protein, 14 aa, Artificial Sequence
  Description of Artificial Sequence: Synthetic peptide
  N-term Acetic Acid
  MOD_RES (1)..(1): (R)-2-allylpyrrolidine-2-carboxylic acid
  MOD_RES (3)..(3): (S)-2-amino-4,4-dimethylpentanoic acid
  MOD_RES (4)..(4): 2-amino-2-(pent-4-en-1-yl)hept-6-enoic acid
  MOD_RES (6)..(6): (S)-3-(4-(1H-tetrazol-5-yl)phenyl)-2-aminopropanoic acid
  MOD_RES (11)..(11): (S)-3-amino-1-((pent-4-en-1-yloxy)carbonyl)pyrrolidine-3- carboxylic acid
  MOD_RES (12)..(12): (S)-2-amino-3-(thiophen-3-yl)propanoic acid
  MOD_RES (13)..(13): (S)-2-amino-3-(benzo[b]thiophen-3-yl)propanoic acid
  C-term amino
XDXXDFAAFNXXXQ

SEQ ID NO: 1214 - protein, 14 aa, Artificial Sequence
  Description of Artificial Sequence: Synthetic peptide
  N-term Acetic Acid
  MOD_RES (1)..(1): (R)-2-allylpyrrolidine-2-carboxylic acid
  MOD_RES (4)..(4): 2-amino-2-(pent-4-en-1-yl)hept-6-enoic acid
  MOD_RES (7)..(7): N6-isopropyl-L-lysine
  MOD_RES (11)..(11): (S)-3-amino-1-((pent-4-en-1-yloxy)carbonyl)pyrrolidine-3- carboxylic acid
  MOD_RES (13)..(13): (S)-2-amino-3-(benzo[b]thiophen-3-yl)propanoic acid
  C-term amino
XNFXDTKAFLXFXQ

SEQ ID NO: 1215 - protein, 14 aa, Artificial Sequence
  Description of Artificial Sequence: Synthetic peptide
  N-term Acetic Acid
  MOD_RES (1)..(1): (R)-2-allylpyrrolidine-2-carboxylic acid
  MOD_RES (4)..(4): 2-amino-2-(pent-4-en-1-yl)hept-6-enoic acid
  MOD_RES (7)..(7): N6-isopropyl-L-lysine
  MOD_RES (11)..(11): (S)-3-amino-1-((pent-4-en-1-yloxy)carbonyl)pyrrolidine-3- carboxylic acid
  MOD_RES (13)..(13): (S)-2-amino-3-(benzo[b]thiophen-3-yl)propanoic acid
  C-term amino
XNWXDTKAFLXFXQ

SEQ ID NO: 1216 - protein, 14 aa, Artificial Sequence
  Description of Artificial Sequence: Synthetic peptide
  N-term Acetic Acid
  MOD_RES (1)..(1): (R)-2-allylpyrrolidine-2-carboxylic acid
  MOD_RES (4)..(4): 2-amino-2-(pent-4-en-1-yl)hept-6-enoic acid
  MOD_RES (7)..(7): N6-isopropyl-L-lysine
  MOD_RES (11)..(11): (S)-3-amino-1-((pent-4-en-1-yloxy)carbonyl)pyrrolidine-3- carboxylic acid
  MOD_RES (13)..(13): (S)-2-amino-3-(benzo[b]thiophen-3-yl)propanoic acid
  C-term amino
XNLXDTKAFLXFXQ

SEQ ID NO: 1217 - protein, 14 aa, Artificial Sequence
  Description of Artificial Sequence: Synthetic peptide
  N-term Acetic Acid
  MOD_RES (1)..(1): (R)-2-allylpyrrolidine-2-carboxylic acid
  MOD_RES (4)..(4): 2-amino-2-(pent-4-en-1-yl)hept-6-enoic acid
  MOD_RES (7)..(7): N6-isopropyl-L-lysine
  MOD_RES (11)..(11): (S)-3-amino-1-((pent-4-en-1-yloxy)carbonyl)pyrrolidine-3- carboxylic acid
  MOD_RES (13)..(13): (S)-2-amino-3-(benzo[b]thiophen-3-yl)propanoic acid
  C-term amino
XNSXDTKAFLXFXQ

SEQ ID NO: 1218 - protein, 14 aa, Artificial Sequence
  Description of Artificial Sequence: Synthetic peptide
  N-term Acetic Acid
  MOD_RES (1)..(1): (R)-2-allylpyrrolidine-2-carboxylic acid
  MOD_RES (4)..(4): 2-amino-2-(pent-4-en-1-yl)hept-6-enoic acid
  MOD_RES (7)..(7): N6-isopropyl-L-lysine
  MOD_RES (11)..(11): (S)-3-amino-1-((pent-4-en-1-yloxy)carbonyl)pyrrolidine-3- carboxylic acid
  MOD_RES (13)..(13): (S)-2-amino-3-(benzo[b]thiophen-3-yl)propanoic acid
  C-term amino
XNQXDTKAFLXFXQ

SEQ ID NO: 1219 - protein, 14 aa, Artificial Sequence
  Description of Artificial Sequence: Synthetic peptide
  N-term Acetic Acid
  MOD_RES (1)..(1): (R)-2-allylpyrrolidine-2-carboxylic acid
  MOD_RES (3)..(3): (S)-2-amino-4,4-dimethylpentanoic acid
  MOD_RES (4)..(4): 2-amino-2-(pent-4-en-1-yl)hept-6-enoic acid
  MOD_RES (7)..(7): N6-isopropyl-L-lysine
  MOD_RES (11)..(11): (S)-3-amino-1-((pent-4-en-1-yloxy)carbonyl)pyrrolidine-3- carboxylic acid
  C-term amino
XNXXDTKAFLXFYQ

SEQ ID NO: 1220 - protein, 14 aa, Artificial Sequence
  Description of Artificial Sequence: Synthetic peptide
  N-term Acetic Acid
  MOD_RES (1)..(1): (R)-2-allylpyrrolidine-2-carboxylic acid
  MOD_RES (3)..(3): (S)-2-amino-4,4-dimethylpentanoic acid
  MOD_RES (4)..(4): 2-amino-2-(pent-4-en-1-yl)hept-6-enoic acid
  MOD_RES (7)..(7): N6-isopropyl-L-lysine
  MOD_RES (11)..(11): (S)-3-amino-1-((pent-4-en-1-yloxy)carbonyl)pyrrolidine-3- carboxylic acid
  MOD_RES (13)..(13): (S)-2-amino-3-(5-chloro-1H-indol-3-yl)propanoic acid
  C-term amino
XNXXDTKAFLXFXQ

SEQ ID NO: 1221 - protein, 14 aa, Artificial Sequence
  Description of Artificial Sequence: Synthetic peptide
  N-term Acetic Acid
  MOD_RES (1)..(1): (R)-2-allylpyrrolidine-2-carboxylic acid
  MOD_RES (3)..(3): (S)-2-amino-4,4-dimethylpentanoic acid
  MOD_RES (4)..(4): 2-amino-2-(pent-4-en-1-yl)hept-6-enoic acid
  MOD_RES (7)..(7): N6-isopropyl-L-lysine
  MOD_RES (11)..(11): (S)-3-amino-1-((pent-4-en-1-yloxy)carbonyl)pyrrolidine-3- carboxylic acid
  MOD_RES (13)..(13): (S)-2-amino-3-(6-chloro-1H-indol-3-yl)propanoic acid
  C-term amino
XNXXDTKAFLXFXQ

SEQ ID NO: 1222 - protein, 14 aa, Artificial Sequence
  Description of Artificial Sequence: Synthetic peptide
  N-term Acetic Acid
  MOD_RES (1)..(1): (R)-2-allylpyrrolidine-2-carboxylic acid
  MOD_RES (3)..(3): (S)-2-amino-4,4-dimethylpentanoic acid
  MOD_RES (4)..(4): 2-amino-2-(pent-4-en-1-yl)hept-6-enoic acid
  MOD_RES (7)..(7): N6-isopropyl-L-lysine
  MOD_RES (11)..(11): (S)-3-amino-1-((pent-4-en-1-yloxy)carbonyl)pyrrolidine-3- carboxylic acid
  MOD_RES (13)..(13): (S)-2-amino-3-(7-fluoro-1H-indol-3-yl)propanoic acid
  C-term amino
XNXXDTKAFLXFXQ

SEQ ID NO: 1223 - protein, 14 aa, Artificial Sequence
  Description of Artificial Sequence: Synthetic peptide
  N-term Acetic Acid
  MOD_RES (1)..(1): (R)-2-allylpyrrolidine-2-carboxylic acid
  MOD_RES (3)..(3): (S)-2-amino-4,4-dimethylpentanoic acid
  MOD_RES (4)..(4): 2-amino-2-(pent-4-en-1-yl)hept-6-enoic acid
  MOD_RES (7)..(7): N6-isopropyl-L-lysine
  MOD_RES (11)..(11): (S)-3-amino-1-((pent-4-en-1-yloxy)carbonyl)pyrrolidine-3- carboxylic acid
  MOD_RES (13)..(13): 1-methyl-L-tryptophan
  C-term amino
XNXXDTKAFLXFWQ

SEQ ID NO: 1224 - protein, 14 aa, Artificial Sequence
  Description of Artificial Sequence: Synthetic peptide
  N-term Acetic Acid
  MOD_RES (1)..(1): (R)-2-allylpyrrolidine-2-carboxylic acid
  MOD_RES (3)..(3): (S)-2-amino-4,4-dimethylpentanoic acid
  MOD_RES (4)..(4): 2-amino-2-(pent-4-en-1-yl)hept-6-enoic acid
  MOD_RES (7)..(7): N6-isopropyl-L-lysine
  MOD_RES (11)..(11): (S)-3-amino-1-((pent-4-en-1-yloxy)carbonyl)pyrrolidine-3- carboxylic acid
  C-term amino
XNXXDTKAFLXYWQ

SEQ ID NO: 1225 - protein, 14 aa, Artificial Sequence
  Description of Artificial Sequence: Synthetic peptide
  N-term Acetic Acid
  MOD_RES (1)..(1): (R)-2-allylpyrrolidine-2-carboxylic acid
  MOD_RES (3)..(3): N6-isopropyl-L-lysine
  MOD_RES (4)..(4): 2-amino-2-(pent-4-en-1-yl)hept-6-enoic acid
  MOD_RES (7)..(7): N6-isopropyl-L-lysine
  MOD_RES (11)..(11): (S)-3-amino-1-((pent-4-en-1-yloxy)carbonyl)pyrrolidine-3- carboxylic acid
  MOD_RES (13)..(13): (S)-2-amino-3-(benzo[b]thiophen-3-yl)propanoic acid
  C-term amino
XNKXDTKAFLXFXQ

SEQ ID NO: 1226 - protein, 14 aa, Artificial Sequence
  Description of Artificial Sequence: Synthetic peptide
  N-term Acetic Acid
  MOD_RES (1)..(1): (R)-2-allylpyrrolidine-2-carboxylic acid
  MOD_RES (3)..(3): (S)-2-amino-4,4-dimethylpentanoic acid
  MOD_RES (4)..(4): 2-amino-2-(pent-4-en-1-yl)hept-6-enoic acid
  MOD_RES (6)..(6): (S)-2-amino-3-(3-carbamoylphenyl)propanoic acid
  MOD_RES (7)..(7): N6-isopropyl-L-lysine
  MOD_RES (11)..(11): (S)-3-amino-1-((pent-4-en-1-yloxy)carbonyl)pyrrolidine-3- carboxylic acid
  MOD_RES (13)..(13): (S)-2-amino-3-(benzo[b]thiophen-3-yl)propanoic acid
  C-term amino
XNXXDFKAFLXFXQ

SEQ ID NO: 1227 - protein, 14 aa, Artificial Sequence
  Description of Artificial Sequence: Synthetic peptide
  N-term Acetic Acid
  MOD_RES (1)..(1): (R)-2-allylpyrrolidine-2-carboxylic acid
  MOD_RES (3)..(3): (S)-2-amino-4,4-dimethylpentanoic acid
  MOD_RES (4)..(4): 2-amino-2-(pent-4-en-1-yl)hept-6-enoic acid
  MOD_RES (7)..(7): N6-isopropyl-L-lysine
  MOD_RES (11)..(11): (S)-3-amino-1-((pent-4-en-1-yloxy)carbonyl)pyrrolidine-3- carboxylic acid
  MOD_RES (13)..(13): (S)-2-amino-3-(benzo[b]thiophen-3-yl)propanoic acid
  C-term amino
XNXXDFKAFLXFXQ

SEQ ID NO: 1228 - protein, 14 aa, Artificial Sequence
  Description of Artificial Sequence: Synthetic peptide
  N-term Acetic Acid
  MOD_RES (1)..(1): (R)-2-allylpyrrolidine-2-carboxylic acid
  MOD_RES (3)..(3): (S)-2-amino-4,4-dimethylpentanoic acid
  MOD_RES (4)..(4): 2-amino-2-(pent-4-en-1-yl)hept-6-enoic acid
  MOD_RES (6)..(6): (S)-2-amino-4,4-dimethylpentanoic acid
  MOD_RES (7)..(7): N6-isopropyl-L-lysine
  MOD_RES (11)..(11): (S)-3-amino-1-((pent-4-en-1-yloxy)carbonyl)pyrrolidine-3- carboxylic acid
  MOD_RES (13)..(13): (S)-2-amino-3-(benzo[b]thiophen-3-yl)propanoic acid
  C-term amino
XNXXDXKAFLXFXQ

SEQ ID NO: 1229 - protein, 14 aa, Artificial Sequence
  Description of Artificial Sequence: Synthetic peptide
  N-term Acetic Acid
  MOD_RES (1)..(1): (R)-2-allylpyrrolidine-2-carboxylic acid
  MOD_RES (3)..(3): (S)-2-amino-4,4-dimethylpentanoic acid
  MOD_RES (4)..(4): 2-amino-2-(pent-4-en-1-yl)hept-6-enoic acid
  MOD_RES (6)..(6): (S)-2-amino-3-(3-(trifluoromethyl)phenyl)propanoic acid
  MOD_RES (7)..(7): N6-isopropyl-L-lysine
  MOD_RES (11)..(11): (S)-3-amino-1-((pent-4-en-1-yloxy)carbonyl)pyrrolidine-3- carboxylic acid
  MOD_RES (13)..(13): (S)-2-amino-3-(benzo[b]thiophen-3-yl)propanoic acid
  C-term amino
XNXXDFKAFLXFXQ

SEQ ID NO: 1230 - protein, 14 aa, Artificial Sequence
  Description of Artificial Sequence: Synthetic peptide
  N-term Acetic Acid
  MOD_RES (1)..(1): (R)-2-allylpyrrolidine-2-carboxylic acid
  MOD_RES (3)..(3): (S)-2-amino-4,4-dimethylpentanoic acid
  MOD_RES (4)..(4): 2-amino-2-(pent-4-en-1-yl)hept-6-enoic acid
  MOD_RES (7)..(7): N6-isopropyl-L-lysine
  MOD_RES (11)..(11): (S)-3-amino-1-((pent-4-en-1-yloxy)carbonyl)pyrrolidine-3- carboxylic acid
  MOD_RES (13)..(13): (S)-2-amino-3-(benzo[b]thiophen-3-yl)propanoic acid
  C-term amino
XNXXDAKAFLXFXQ

SEQ ID NO: 1231 - protein, 14 aa, Artificial Sequence
  Description of Artificial Sequence: Synthetic peptide
  N-term Acetic Acid
  MOD_RES (1)..(1): (R)-2-allylpyrrolidine-2-carboxylic acid
  MOD_RES (3)..(3): (S)-2-amino-4,4-dimethylpentanoic acid
  MOD_RES (4)..(4): 2-amino-2-(pent-4-en-1-yl)hept-6-enoic acid
  MOD_RES (7)..(7): N6-isopropyl-L-lysine
  MOD_RES (11)..(11): (S)-3-amino-1-((pent-4-en-1-yloxy)carbonyl)pyrrolidine-3- carboxylic acid
  MOD_RES (13)..(13): (S)-2-amino-3-(benzo[b]thiophen-3-yl)propanoic acid
  C-term amino
XNXXDTKASLXFXQ

SEQ ID NO: 1232 - protein, 14 aa, Artificial Sequence
  Description of Artificial Sequence: Synthetic peptide
  N-term Acetic Acid
  MOD_RES (1)..(1): (R)-2-allylpyrrolidine-2-carboxylic acid
  MOD_RES (3)..(3): (S)-2-amino-4,4-dimethylpentanoic acid
  MOD_RES (4)..(4): 2-amino-2-(pent-4-en-1-yl)hept-6-enoic acid
  MOD_RES (7)..(7): N6-isopropyl-L-lysine
  MOD_RES (9)..(9): (S)-2-amino-4,4-dimethylpentanoic acid
  MOD_RES (11)..(11): (S)-3-amino-1-((pent-4-en-1-yloxy)carbonyl)pyrrolidine-3- carboxylic acid
  MOD_RES (13)..(13): (S)-2-amino-3-(benzo[b]thiophen-3-yl)propanoic acid
  C-term amino
XNXXDTKAXLXFXQ

SEQ ID NO: 1233 - protein, 14 aa, Artificial Sequence
  Description of Artificial Sequence: Synthetic peptide
  N-term Acetic Acid
  MOD_RES (1)..(1): (R)-2-allylpyrrolidine-2-carboxylic acid
  MOD_RES (3)..(3): (S)-2-amino-4,4-dimethylpentanoic acid
  MOD_RES (4)..(4): 2-amino-2-(pent-4-en-1-yl)hept-6-enoic acid
  MOD_RES (7)..(7): N6-isopropyl-L-lysine
  MOD_RES (11)..(11): (S)-3-amino-1-((pent-4-en-1-yloxy)carbonyl)pyrrolidine-3- carboxylic acid
  MOD_RES (13)..(13): (S)-2-amino-3-(benzo[b]thiophen-3-yl)propanoic acid
  C-term amino
XNXXDTKAFFXFXQ

SEQ ID NO: 1234 - protein, 14 aa, Artificial Sequence
  Description of Artificial Sequence: Synthetic peptide
  N-term Acetic Acid
  MOD_RES (1)..(1): (R)-2-allylpyrrolidine-2-carboxylic acid
  MOD_RES (3)..(3): (S)-2-amino-4,4-dimethylpentanoic acid
  MOD_RES (4)..(4): 2-amino-2-(pent-4-en-1-yl)hept-6-enoic acid
  MOD_RES (7)..(7): N6-isopropyl-L-lysine
  MOD_RES (11)..(11): (S)-3-amino-1-((pent-4-en-1-yloxy)carbonyl)pyrrolidine-3- carboxylic acid
  MOD_RES (13)..(13): (S)-2-amino-3-(benzo[b]thiophen-3-yl)propanoic acid
  C-term amino
XNXXDTKAFWXFXQ

SEQ ID NO: 1235 - protein, 14 aa, Artificial Sequence
  Description of Artificial Sequence: Synthetic peptide
  N-term Acetic Acid
  MOD_RES (1)..(1): (R)-2-allylpyrrolidine-2-carboxylic acid
  MOD_RES (3)..(3): (S)-2-amino-4,4-dimethylpentanoic acid
  MOD_RES (4)..(4): 2-amino-2-(pent-4-en-1-yl)hept-6-enoic acid
  MOD_RES (7)..(7): N6-isopropyl-L-lysine
  MOD_RES (11)..(11): (S)-3-amino-1-((pent-4-en-1-yloxy)carbonyl)pyrrolidine-3- carboxylic acid
  MOD_RES (13)..(13): (S)-2-amino-3-(benzo[b]thiophen-3-yl)propanoic acid
  C-term amino
XNXXDTKAFSXFXQ

SEQ ID NO: 1236 - protein, 14 aa, Artificial Sequence
  Description of Artificial Sequence: Synthetic peptide
  N-term Acetic Acid
  MOD_RES (1)..(1): (R)-2-allylpyrrolidine-2-carboxylic acid
  MOD_RES (3)..(3): (S)-2-amino-4,4-dimethylpentanoic acid
  MOD_RES (4)..(4): 2-amino-2-(pent-4-en-1-yl)hept-6-enoic acid
  MOD_RES (7)..(7): N6-isopropyl-L-lysine
  MOD_RES (11)..(11): (S)-3-amino-1-((pent-4-en-1-yloxy)carbonyl)pyrrolidine-3- carboxylic acid
  MOD_RES (13)..(13): (S)-2-amino-3-(benzo[b]thiophen-3-yl)propanoic acid
  C-term amino
XNXXDTKAFNXFXQ

SEQ ID NO: 1237 - protein, 14 aa, Artificial Sequence
  Description of Artificial Sequence: Synthetic peptide
  N-term Acetic Acid
  MOD_RES (1)..(1): (R)-2-allylpyrrolidine-2-carboxylic acid
  MOD_RES (3)..(3): (S)-2-amino-4,4-dimethylpentanoic acid
  MOD_RES (4)..(4): 2-amino-2-(pent-4-en-1-yl)hept-6-enoic acid
  MOD_RES (7)..(7): N6-isopropyl-L-lysine
  MOD_RES (11)..(11): (S)-3-amino-1-((pent-4-en-1-yloxy)carbonyl)pyrrolidine-3- carboxylic acid
  MOD_RES (12)..(12): (S)-2-amino-4,4-dimethylpentanoic acid
  MOD_RES (13)..(13): (S)-2-amino-3-(benzo[b]thiophen-3-yl)propanoic acid
  C-term amino
XNXXDTKAFLXXXQ

SEQ ID NO: 1238 - protein, 14 aa, Artificial Sequence
  Description of Artificial Sequence: Synthetic peptide
  N-term Acetic Acid
  MOD_RES (1)..(1): (R)-2-allylpyrrolidine-2-carboxylic acid
  MOD_RES (3)..(3): (S)-2-amino-4,4-dimethylpentanoic acid
  MOD_RES (4)..(4): 2-amino-2-(pent-4-en-1-yl)hept-6-enoic acid
  MOD_RES (6)..(6): (S)-2-amino-3-((carboxymethyl)(2,2,2-trifluoroethyl)amino) propanoic acid
  MOD_RES (11)..(11): (S)-3-amino-1-((pent-4-en-1-yloxy)carbonyl)pyrrolidine-3- carboxylic acid
  MOD_RES (12)..(12): (S)-2-amino-3-(2-chlorophenyl)propanoic acid
  MOD_RES (13)..(13): (S)-2-amino-3-(benzo[b]thiophen-3-yl)propanoic acid
  MOD_RES (14)..(14): (S)-2-amino-5-(4,4-difluoropiperidin-1-yl)pentanoic acid
  C-term amino
XDXXDXAAFTXFXX

SEQ ID NO: 1239 - protein, 14 aa, Artificial Sequence
  Description of Artificial Sequence: Synthetic peptide
  N-term Acetic Acid
  MOD_RES (1)..(1): (R)-2-allylpyrrolidine-2-carboxylic acid
  MOD_RES (3)..(3): (S)-2-amino-4,4-dimethylpentanoic acid
  MOD_RES (4)..(4): 2-amino-2-(pent-4-en-1-yl)hept-6-enoic acid
  MOD_RES (6)..(6): (S)-3-(2-amino-2-carboxyethyl)benzoic acid
  MOD_RES (11)..(11): (S)-3-amino-1-((pent-4-en-1-yloxy)carbonyl)pyrrolidine-3- carboxylic acid
  MOD_RES (12)..(12): (S)-2-amino-3-(2-(trifluoromethyl)phenyl)propanoic acid
  MOD_RES (13)..(13): (S)-2-amino-3-(benzo[b]thiophen-3-yl)propanoic acid
  MOD_RES (14)..(14): (S)-2-amino-5-(4,4-difluoropiperidin-1-yl)pentanoic acid
  C-term amino
XDXXDXAAFLXFXX

SEQ ID NO: 1240 - protein, 14 aa, Artificial Sequence
  Description of Artificial Sequence: Synthetic peptide
  N-term Acetic Acid
  MOD_RES (1)..(1): (R)-2-allylpyrrolidine-2-carboxylic acid
  MOD_RES (3)..(3): (S)-2-amino-4,4-dimethylpentanoic acid
  MOD_RES (4)..(4): 2-amino-2-(pent-4-en-1-yl)hept-6-enoic acid
  MOD_RES (6)..(6): (S)-2-amino-3-((carboxymethyl)(2,2,2-trifluoroethyl)amino) propanoic acid
  MOD_RES (11)..(11): (S)-3-amino-1-((pent-4-en-1-yloxy)carbonyl)pyrrolidine-3- carboxylic acid
  MOD_RES (12)..(12): (S)-2-amino-3-(2-chlorophenyl)propanoic acid
  MOD_RES (13)..(13): (S)-2-amino-3-(benzo[b]thiophen-3-yl)propanoic acid
  MOD_RES (14)..(14): (S)-2-amino-5-morpholinopentanoic acid
  C-term amino
XDXXDXAAFTXFXX

SEQ ID NO: 1241 - protein, 14 aa, Artificial Sequence
  Description of Artificial Sequence: Synthetic peptide
  N-term Acetic Acid
  MOD_RES (1)..(1): (R)-2-allylpyrrolidine-2-carboxylic acid
  MOD_RES (3)..(3): (S)-2-amino-4,4-dimethylpentanoic acid
  MOD_RES (4)..(4): 2-amino-2-(pent-4-en-1-yl)hept-6-enoic acid
  MOD_RES (6)..(6): (S)-3-(2-amino-2-carboxyethyl)benzoic acid
  MOD_RES (11)..(11): (S)-3-amino-1-((pent-4-en-1-yloxy)carbonyl)pyrrolidine-3- carboxylic acid
  MOD_RES (12)..(12): (S)-2-amino-3-(2-(trifluoromethyl)phenyl)propanoic acid
  MOD_RES (13)..(13): (S)-2-amino-3-(benzo[b]thiophen-3-yl)propanoic acid
  MOD_RES (14)..(14): (S)-2-amino-5-morpholinopentanoic acid
  C-term amino
XDXXDXAAFLXFXX

SEQ ID NO: 1242 - protein, 14 aa, Artificial Sequence
  Description of Artificial Sequence: Synthetic peptide
  N-term Acetic Acid
  MOD_RES (1)..(1): (R)-2-allylpyrrolidine-2-carboxylic acid
  MOD_RES (3)..(3): (S)-2-amino-4,4-dimethylpentanoic acid
  MOD_RES (4)..(4): 2-amino-2-(pent-4-en-1-yl)hept-6-enoic acid
  MOD_RES (6)..(6): (S)-2-amino-3-((carboxymethyl)(2,2,2-trifluoroethyl)amino) propanoic acid
  MOD_RES (11)..(11): (S)-3-amino-1-((pent-4-en-1-yloxy)carbonyl)pyrrolidine-3- carboxylic acid
  MOD_RES (12)..(12): (S)-2-amino-3-(2-chlorophenyl)propanoic acid
  MOD_RES (13)..(13): (S)-2-amino-3-(benzo[b]thiophen-3-yl)propanoic acid
  MOD_RES (14)..(14): (S)-2-amino-4-(4-methylpiperazin-1-yl)-4-oxobutanoic acid
  C-term amino
XDXXDXAAFTXFXX

SEQ ID NO: 1243 - protein, 14 aa, Artificial Sequence
  Description of Artificial Sequence: Synthetic peptide
  N-term Acetic Acid
  MOD_RES (1)..(1): (R)-2-allylpyrrolidine-2-carboxylic acid
  MOD_RES (3)..(3): (S)-2-amino-4,4-dimethylpentanoic acid
  MOD_RES (4)..(4): 2-amino-2-(pent-4-en-1-yl)hept-6-enoic acid
  MOD_RES (6)..(6): (S)-3-(2-amino-2-carboxyethyl)benzoic acid
  MOD_RES (11)..(11): (S)-3-amino-1-((pent-4-en-1-yloxy)carbonyl)pyrrolidine-3- carboxylic acid
  MOD_RES (12)..(12): (S)-2-amino-3-(2-(trifluoromethyl)phenyl)propanoic acid
  MOD_RES (13)..(13): (S)-2-amino-3-(benzo[b]thiophen-3-yl)propanoic acid
  MOD_RES (14)..(14): (S)-2-amino-4-(4-methylpiperazin-1-yl)-4-oxobutanoic acid
  C-term amino
XDXXDXAAFLXFXX

SEQ ID NO: 1244 - protein, 14 aa, Artificial Sequence
  Description of Artificial Sequence: Synthetic peptide
  N-term Acetic Acid
  MOD_RES (1)..(1): (R)-2-allylpyrrolidine-2-carboxylic acid
  MOD_RES (3)..(3): (S)-2-amino-4,4-dimethylpentanoic acid
  MOD_RES (4)..(4): 2-amino-2-(pent-4-en-1-yl)hept-6-enoic acid
  MOD_RES (6)..(6): (S)-2-amino-3-((carboxymethyl)(2,2,2-trifluoroethyl)amino) propanoic acid
  MOD_RES (11)..(11): (S)-3-amino-1-((pent-4-en-1-yloxy)carbonyl)pyrrolidine-3- carboxylic acid
  MOD_RES (12)..(12): (S)-2-amino-3-(2-chlorophenyl)propanoic acid
  MOD_RES (13)..(13): (S)-2-amino-3-(benzo[b]thiophen-3-yl)propanoic acid
  MOD_RES (14)..(14): (S)-2-amino-4-morpholino-4-oxobutanoic acid
  C-term amino
XDXXDXAAFTXFXX

SEQ ID NO: 1245 - protein, 14 aa, Artificial Sequence
  Description of Artificial Sequence: Synthetic peptide
  N-term Acetic Acid
  MOD_RES (1)..(1): (R)-2-allylpyrrolidine-2-carboxylic acid
  MOD_RES (3)..(3): (S)-2-amino-4,4-dimethylpentanoic acid
  MOD_RES (4)..(4): 2-amino-2-(pent-4-en-1-yl)hept-6-enoic acid
  MOD_RES (6)..(6): (S)-3-(2-amino-2-carboxyethyl)benzoic acid
  MOD_RES (11)..(11): (S)-3-amino-1-((pent-4-en-1-yloxy)carbonyl)pyrrolidine-3- carboxylic acid
  MOD_RES (12)..(12): (S)-2-amino-3-(2-(trifluoromethyl)phenyl)propanoic acid
  MOD_RES (13)..(13): (S)-2-amino-3-(benzo[b]thiophen-3-yl)propanoic acid
  MOD_RES (14)..(14): (S)-2-amino-4-morpholino-4-oxobutanoic acid
  C-term amino
XDXXDXAAFLXFXX

SEQ ID NO: 1246 - protein, 14 aa, Artificial Sequence
  Description of Artificial Sequence: Synthetic peptide
  N-term Acetic Acid
  MOD_RES (1)..(1): (R)-2-allylpyrrolidine-2-carboxylic acid
  MOD_RES (3)..(3): (S)-2-amino-4,4-dimethylpentanoic acid
  MOD_RES (4)..(4): 2-amino-2-(pent-4-en-1-yl)hept-6-enoic acid
  MOD_RES (6)..(6): (S)-2-amino-3-((carboxymethyl)(2,2,2-trifluoroethyl)amino) propanoic acid
  MOD_RES (11)..(11): (S)-3-amino-1-((pent-4-en-1-yloxy)carbonyl)pyrrolidine-3- carboxylic acid
  MOD_RES (12)..(12): (S)-2-amino-3-(2-chlorophenyl)propanoic acid
  MOD_RES (13)..(13): (S)-2-amino-3-(benzo[b]thiophen-3-yl)propanoic acid
  MOD_RES (14)..(14): N6-isopropyl-L-lysine
  C-term amino
XDXXDXAAFTXFXK

SEQ ID NO: 1247 - protein, 14 aa, Artificial Sequence
  Description of Artificial Sequence: Synthetic peptide
  N-term Acetic Acid
  MOD_RES (1)..(1): (R)-2-allylpyrrolidine-2-carboxylic acid
  MOD_RES (3)..(3): (S)-2-amino-4,4-dimethylpentanoic acid
  MOD_RES (4)..(4): 2-amino-2-(pent-4-en-1-yl)hept-6-enoic acid
  MOD_RES (6)..(6): (S)-3-(2-amino-2-carboxyethyl)benzoic acid
  MOD_RES (11)..(11): (S)-3-amino-1-((pent-4-en-1-yloxy)carbonyl)pyrrolidine-3- carboxylic acid
  MOD_RES (12)..(12): (S)-2-amino-3-(2-(trifluoromethyl)phenyl)propanoic acid
  MOD_RES (13)..(13): (S)-2-amino-3-(benzo[b]thiophen-3-yl)propanoic acid
  MOD_RES (14)..(14): N6-isopropyl-L-lysine
  C-term amino
XDXXDXAAFLXFXK

SEQ ID NO: 1248 - protein, 14 aa, Artificial Sequence
  Description of Artificial Sequence: Synthetic peptide
  N-term Acetic Acid
  MOD_RES (1)..(1): (R)-2-allylpyrrolidine-2-carboxylic acid
  MOD_RES (3)..(3): (S)-2-amino-4,4-dimethylpentanoic acid
  MOD_RES (4)..(4): 2-amino-2-(pent-4-en-1-yl)hept-6-enoic acid
  MOD_RES (11)..(11): (S)-2-amino-2-methyldec-9-enoic acid
  MOD_RES (12)..(12): (S)-2-amino-3-(thiophen-3-yl)propanoic acid
  MOD_RES (13)..(13): (S)-2-amino-3-(benzo[b]thiophen-3-yl)propanoic acid
  C-term amino
XDXXNTAAFNXXXQ

SEQ ID NO: 1249 - protein, 14 aa, Artificial Sequence
  Description of Artificial Sequence: Synthetic peptide
  N-term Acetic Acid
  MOD_RES (1)..(1): (R)-2-allylpyrrolidine-2-carboxylic acid
  MOD_RES (3)..(3): (S)-2-amino-4,4-dimethylpentanoic acid
  MOD_RES (4)..(4): 2-amino-2-(pent-4-en-1-yl)hept-6-enoic acid
  MOD_RES (11)..(11): (S)-3-amino-1-((pent-4-en-1-yloxy)carbonyl)pyrrolidine-3- carboxylic acid
  MOD_RES (12)..(12): (S)-2-amino-3-(thiophen-3-yl)propanoic acid
  MOD_RES (13)..(13): (S)-2-amino-3-(benzo[b]thiophen-3-yl)propanoic acid
  C-term amino
XDXXNTAAFLXXXQ

SEQ ID NO: 1250 - protein, 14 aa, Artificial Sequence
  Description of Artificial Sequence: Synthetic peptide
  N-term Acetic Acid
  MOD_RES (1)..(1): (R)-2-allylpyrrolidine-2-carboxylic acid
  MOD_RES (3)..(3): (S)-2-amino-4,4-dimethylpentanoic acid
  MOD_RES (4)..(4): 2-amino-2-(pent-4-en-1-yl)hept-6-enoic acid
  MOD_RES (10)..(10): (S)-2-aminohexanoic acid
  MOD_RES (11)..(11): (S)-3-amino-1-((pent-4-en-1-yloxy)carbonyl)pyrrolidine-3- carboxylic acid
  MOD_RES (12)..(12): (S)-2-amino-3-(thiophen-3-yl)propanoic acid
  MOD_RES (13)..(13): (S)-2-amino-3-(benzo[b]thiophen-3-yl)propanoic acid
  C-term amino
XDXXNTAAFXXXXQ

SEQ ID NO: 1251 - protein, 14 aa, Artificial Sequence
  Description of Artificial Sequence: Synthetic peptide
  N-term Acetic Acid
  MOD_RES (1)..(1): (R)-2-allylpyrrolidine-2-carboxylic acid
  MOD_RES (3)..(3): (S)-2-amino-4,4-dimethylpentanoic acid
  MOD_RES (4)..(4): 2-amino-2-(pent-4-en-1-yl)hept-6-enoic acid
  MOD_RES (10)..(10): (S)-2-amino-5-methylhexanoic acid
  MOD_RES (11)..(11): (S)-3-amino-1-((pent-4-en-1-yloxy)carbonyl)pyrrolidine-3- carboxylic acid
  MOD_RES (12)..(12): (S)-2-amino-3-(thiophen-3-yl)propanoic acid
  MOD_RES (13)..(13): (S)-2-amino-3-(benzo[b]thiophen-3-yl)propanoic acid
  C-term amino
XDXXNTAAFXXXXQ

SEQ ID NO: 1252 - protein, 14 aa, Artificial Sequence
  Description of Artificial Sequence: Synthetic peptide
  N-term Acetic Acid
  MOD_RES (1)..(1): (R)-2-allylpyrrolidine-2-carboxylic acid
  MOD_RES (3)..(3): (S)-2-amino-4,4-dimethylpentanoic acid
  MOD_RES (4)..(4): 2-amino-2-(pent-4-en-1-yl)hept-6-enoic acid
  MOD_RES (11)..(11): (S)-3-amino-1-((pent-4-en-1-yloxy)carbonyl)pyrrolidine-3- carboxylic acid
  MOD_RES (12)..(12): (S)-2-amino-3-(thiophen-3-yl)propanoic acid
  MOD_RES (13)..(13): (S)-2-amino-3-(benzo[b]thiophen-3-yl)propanoic acid
  C-term amino
XDXXNTAAFTXXXQ

SEQ ID NO: 1253 - protein, 14 aa, Artificial Sequence
  Description of Artificial Sequence: Synthetic peptide
  N-term Acetic Acid
  MOD_RES (1)..(1): (R)-2-allylpyrrolidine-2-carboxylic acid
  MOD_RES (3)..(3): (S)-2-amino-4,4-dimethylpentanoic acid
  MOD_RES (4)..(4): 2-amino-2-(pent-4-en-1-yl)hept-6-enoic acid
  MOD_RES (6)..(6): (S)-2-amino-3-((carboxymethyl)(ethyl)amino)propanoic acid
  MOD_RES (11)..(11): (S)-3-amino-1-((pent-4-en-1-yloxy)carbonyl)pyrrolidine-3- carboxylic acid
  MOD_RES (12)..(12): (S)-2-amino-3-(2-chlorophenyl)propanoic acid
  MOD_RES (13)..(13): (S)-2-amino-3-(benzo[b]thiophen-3-yl)propanoic acid
  C-term amino
XDXXDXAAFNXFXQ

SEQ ID NO: 1254 - protein, 14 aa, Artificial Sequence
  Description of Artificial Sequence: Synthetic peptide
  N-term Acetic Acid
  MOD_RES (1)..(1): (R)-2-allylpyrrolidine-2-carboxylic acid
  MOD_RES (3)..(3): (S)-2-amino-4,4-dimethylpentanoic acid
  MOD_RES (4)..(4): 2-amino-2-(pent-4-en-1-yl)hept-6-enoic acid
  MOD_RES (6)..(6): (2S)-2-amino-3-(sec-butyl(carboxymethyl)amino)propanoic acid
  MOD_RES (11)..(11): (S)-3-amino-1-((pent-4-en-1-yloxy)carbonyl)pyrrolidine-3- carboxylic acid
  MOD_RES (12)..(12): (S)-2-amino-3-(2-chlorophenyl)propanoic acid
  MOD_RES (13)..(13): (S)-2-amino-3-(benzo[b]thiophen-3-yl)propanoic acid
  C-term amino
XDXXDXAAFNXFXQ

SEQ ID NO: 1255 - protein, 14 aa, Artificial Sequence
  Description of Artificial Sequence: Synthetic peptide
  N-term Acetic Acid
  MOD_RES (1)..(1): (R)-2-allylpyrrolidine-2-carboxylic acid
  MOD_RES (3)..(3): (S)-2-amino-4,4-dimethylpentanoic acid
  MOD_RES (4)..(4): 2-amino-2-(pent-4-en-1-yl)hept-6-enoic acid
  MOD_RES (6)..(6): (S)-2-amino-3-((carboxymethyl)((perfluorophenyl)methyl)amino) propanoic acid
  MOD_RES (11)..(11): (S)-2-amino-2-methyldec-9-enoic acid
  MOD_RES (12)..(12): (S)-2-amino-3-(thiophen-3-yl)propanoic acid
  MOD_RES (13)..(13): (S)-2-amino-3-(benzo[b]thiophen-3-yl)propanoic acid
  C-term amino
XDXXDXAAFNXXXQ

SEQ ID NO: 1256 - protein, 14 aa, Artificial Sequence
  Description of Artificial Sequence: Synthetic peptide
  N-term Acetic Acid
  MOD_RES (1)..(1): (R)-2-allylpyrrolidine-2-carboxylic acid
  MOD_RES (3)..(3): (S)-2-amino-4,4-dimethylpentanoic acid
  MOD_RES (4)..(4): 2-amino-2-(pent-4-en-1-yl)hept-6-enoic acid
  MOD_RES (6)..(6): (S)-2-amino-3-((carboxymethyl)(3,3,3-trifluoropropyl)amino) propanoic acid
  MOD_RES (11)..(11): (S)-2-amino-2-methyldec-9-enoic acid
  MOD_RES (12)..(12): (S)-2-amino-3-(thiophen-3-yl)propanoic acid
  MOD_RES (13)..(13): (S)-2-amino-3-(benzo[b]thiophen-3-yl)propanoic acid
  C-term amino
XDXXDXAAFNXXXQ

SEQ ID NO: 1257 - protein, 14 aa, Artificial Sequence
  Description of Artificial Sequence: Synthetic peptide
  N-term Acetic Acid
  MOD_RES (1)..(1): (R)-2-allylpyrrolidine-2-carboxylic acid
  MOD_RES (3)..(3): (S)-2-amino-4,4-dimethylpentanoic acid
  MOD_RES (4)..(4): 2-amino-2-(pent-4-en-1-yl)hept-6-enoic acid
  MOD_RES (6)..(6): (2S)-2-amino-3-(sec-butyl(carboxymethyl)amino)propanoic acid
  MOD_RES (11)..(11): (S)-2-amino-2-methyldec-9-enoic acid
  MOD_RES (12)..(12): (S)-2-amino-3-(thiophen-3-yl)propanoic acid
  MOD_RES (13)..(13): (S)-2-amino-3-(benzo[b]thiophen-3-yl)propanoic acid
  C-term amino
XDXXDXAAFNXXXQ

SEQ ID NO: 1258 - protein, 14 aa, Artificial Sequence
  Description of Artificial Sequence: Synthetic peptide
  N-term Acetic Acid
  MOD_RES (1)..(1): (R)-2-allylpyrrolidine-2-carboxylic acid
  MOD_RES (3)..(3): (S)-2-amino-4,4-dimethylpentanoic acid
  MOD_RES (4)..(4): 2-amino-2-(pent-4-en-1-yl)hept-6-enoic acid
  MOD_RES (6)..(6): (S)-2-amino-3-((carboxymethyl)(ethyl)amino)propanoic acid
  MOD_RES (11)..(11): (S)-2-amino-2-methyldec-9-enoic acid
  MOD_RES (12)..(12): (S)-2-amino-3-(thiophen-3-yl)propanoic acid
  MOD_RES (13)..(13): (S)-2-amino-3-(benzo[b]thiophen-3-yl)propanoic acid
  C-term amino
XDXXDXAAFNXXXQ

SEQ ID NO: 1259 - protein, 14 aa, Artificial Sequence
  Description of Artificial Sequence: Synthetic peptide
  N-term Acetic Acid
  MOD_RES (1)..(1): (R)-2-allylpyrrolidine-2-carboxylic acid
  MOD_RES (3)..(3): (S)-2-amino-4,4-dimethylpentanoic acid
  MOD_RES (4)..(4): 2-amino-2-(pent-4-en-1-yl)hept-6-enoic acid
  MOD_RES (6)..(6): (S)-2-amino-3-((carboxymethyl)(4,4,4-trifluorobutyl)amino) propanoic acid
  MOD_RES (11)..(11): (S)-3-amino-1-((pent-4-en-1-yloxy)carbonyl)pyrrolidine-3- carboxylic acid
  MOD_RES (12)..(12): (S)-2-amino-3-(thiophen-3-yl)propanoic acid
  MOD_RES (13)..(13): (S)-2-amino-3-(benzo[b]thiophen-3-yl)propanoic acid
  C-term amino
XDXXDXAAFLXXXQ

SEQ ID NO: 1260 - protein, 14 aa, Artificial Sequence
  Description of Artificial Sequence: Synthetic peptide
  N-term Acetic Acid
  MOD_RES (1)..(1): (R)-2-allylpyrrolidine-2-carboxylic acid
  MOD_RES (3)..(3): (S)-2-amino-4,4-dimethylpentanoic acid
  MOD_RES (4)..(4): 2-amino-2-(pent-4-en-1-yl)hept-6-enoic acid
  MOD_RES (6)..(6): (S)-2-amino-3-(benzyl(carboxymethyl)amino)propanoic acid
  MOD_RES (11)..(11): (S)-3-amino-1-((pent-4-en-1-yloxy)carbonyl)pyrrolidine-3- carboxylic acid
  MOD_RES (12)..(12): (S)-2-amino-3-(thiophen-3-yl)propanoic acid
  MOD_RES (13)..(13): (S)-2-amino-3-(benzo[b]thiophen-3-yl)propanoic acid
  C-term amino
XDXXDXAAFLXXXQ

SEQ ID NO: 1261 - protein, 14 aa, Artificial Sequence
  Description of Artificial Sequence: Synthetic peptide
  N-term Acetic Acid
  MOD_RES (1)..(1): (R)-2-allylpyrrolidine-2-carboxylic acid
  MOD_RES (3)..(3): (S)-2-amino-4,4-dimethylpentanoic acid
  MOD_RES (4)..(4): 2-amino-2-(pent-4-en-1-yl)hept-6-enoic acid
  MOD_RES (6)..(6): (S)-2-amino-3-((carboxymethyl)(methyl)amino)propanoic acid
  MOD_RES (11)..(11): (S)-3-amino-1-((pent-4-en-1-yloxy)carbonyl)pyrrolidine-3- carboxylic acid
  MOD_RES (12)..(12): (S)-2-amino-3-(thiophen-3-yl)propanoic acid
  MOD_RES (13)..(13): (S)-2-amino-3-(benzo[b]thiophen-3-yl)propanoic acid
  C-term amino
XDXXDXAAFLXXXQ

SEQ ID NO: 1262 - protein, 14 aa, Artificial Sequence
  Description of Artificial Sequence: Synthetic peptide
  N-term Acetic Acid
  MOD_RES (1)..(1): (R)-2-allylpyrrolidine-2-carboxylic acid
  MOD_RES (3)..(3): (S)-2-amino-4,4-dimethylpentanoic acid
  MOD_RES (4)..(4): 2-amino-2-(pent-4-en-1-yl)hept-6-enoic acid
  MOD_RES (6)..(6): (S)-2-amino-3-((carboxymethyl)((perfluorophenyl)methyl)amino) propanoic acid
  MOD_RES (11)..(11): (S)-3-amino-1-((pent-4-en-1-yloxy)carbonyl)pyrrolidine-3- carboxylic acid
  MOD_RES (12)..(12): (S)-2-amino-3-(thiophen-3-yl)propanoic acid
  MOD_RES (13)..(13): (S)-2-amino-3-(benzo[b]thiophen-3-yl)propanoic acid
  C-term amino
XDXXDXAAFLXXXQ

SEQ ID NO: 1263 - protein, 14 aa, Artificial Sequence
  Description of Artificial Sequence: Synthetic peptide
  N-term Acetic Acid
  MOD_RES (1)..(1): (R)-2-allylpyrrolidine-2-carboxylic acid
  MOD_RES (3)..(3): (S)-2-amino-4,4-dimethylpentanoic acid
  MOD_RES (4)..(4): 2-amino-2-(pent-4-en-1-yl)hept-6-enoic acid
  MOD_RES (6)..(6): (S)-2-amino-3-((carboxymethyl)(3,3,3-trifluoropropyl)amino) propanoic acid
  MOD_RES (11)..(11): (S)-3-amino-1-((pent-4-en-1-yloxy)carbonyl)pyrrolidine-3- carboxylic acid
  MOD_RES (12)..(12): (S)-2-amino-3-(thiophen-3-yl)propanoic acid
  MOD_RES (13)..(13): (S)-2-amino-3-(benzo[b]thiophen-3-yl)propanoic acid
  C-term amino
XDXXDXAAFLXXXQ

SEQ ID NO: 1264 - protein, 14 aa, Artificial Sequence
  Description of Artificial Sequence: Synthetic peptide
  N-term Acetic Acid
  MOD_RES (1)..(1): (R)-2-allylpyrrolidine-2-carboxylic acid
  MOD_RES (3)..(3): (S)-2-amino-4,4-dimethylpentanoic acid
  MOD_RES (4)..(4): 2-amino-2-(pent-4-en-1-yl)hept-6-enoic acid
  MOD_RES (6)..(6): (S)-2-amino-3-((carboxymethyl)(4,4,4-trifluorobutyl)amino) propanoic acid
  MOD_RES (11)..(11): (S)-3-amino-1-((pent-4-en-1-yloxy)carbonyl)pyrrolidine-3- carboxylic acid
  MOD_RES (12)..(12): (S)-2-amino-3-(thiophen-3-yl)propanoic acid
  MOD_RES (13)..(13): (S)-2-amino-3-(benzo[b]thiophen-3-yl)propanoic acid
  C-term amino
XDXXDXAAFNXXXQ

SEQ ID NO: 1265 - protein, 14 aa, Artificial Sequence
  Description of Artificial Sequence: Synthetic peptide
  N-term Acetic Acid
  MOD_RES (1)..(1): (R)-2-allylpyrrolidine-2-carboxylic acid
  MOD_RES (3)..(3): (S)-2-amino-4,4-dimethylpentanoic acid
  MOD_RES (4)..(4): 2-amino-2-(pent-4-en-1-yl)hept-6-enoic acid
  MOD_RES (6)..(6): (S)-2-amino-3-(benzyl(carboxymethyl)amino)propanoic acid
  MOD_RES (11)..(11): (S)-3-amino-1-((pent-4-en-1-yloxy)carbonyl)pyrrolidine-3- carboxylic acid
  MOD_RES (12)..(12): (S)-2-amino-3-(thiophen-3-yl)propanoic acid
  MOD_RES (13)..(13): (S)-2-amino-3-(benzo[b]thiophen-3-yl)propanoic acid
  C-term amino
XDXXDXAAFNXXXQ

SEQ ID NO: 1266 - protein, 14 aa, Artificial Sequence
  Description of Artificial Sequence: Synthetic peptide
  N-term Acetic Acid
  MOD_RES (1)..(1): (R)-2-allylpyrrolidine-2-carboxylic acid
  MOD_RES (3)..(3): (S)-2-amino-4,4-dimethylpentanoic acid
  MOD_RES (4)..(4): 2-amino-2-(pent-4-en-1-yl)hept-6-enoic acid
  MOD_RES (6)..(6): (S)-2-amino-3-((carboxymethyl)(methyl)amino)propanoic acid
  MOD_RES (11)..(11): (S)-3-amino-1-((pent-4-en-1-yloxy)carbonyl)pyrrolidine-3- carboxylic acid
  MOD_RES (12)..(12): (S)-2-amino-3-(thiophen-3-yl)propanoic acid
  MOD_RES (13)..(13): (S)-2-amino-3-(benzo[b]thiophen-3-yl)propanoic acid
  C-term amino
XDXXDXAAFNXXXQ

SEQ ID NO: 1267 - protein, 14 aa, Artificial Sequence
  Description of Artificial Sequence: Synthetic peptide
  N-term Acetic Acid
  MOD_RES (1)..(1): (R)-2-allylpyrrolidine-2-carboxylic acid
  MOD_RES (3)..(3): (S)-2-amino-4,4-dimethylpentanoic acid
  MOD_RES (4)..(4): 2-amino-2-(pent-4-en-1-yl)hept-6-enoic acid
  MOD_RES (6)..(6): (S)-2-amino-3-((carboxymethyl)((perfluorophenyl)methyl)amino) propanoic acid
  MOD_RES (11)..(11): (S)-3-amino-1-((pent-4-en-1-yloxy)carbonyl)pyrrolidine-3- carboxylic acid
  MOD_RES (12)..(12): (S)-2-amino-3-(thiophen-3-yl)propanoic acid
  MOD_RES (13)..(13): (S)-2-amino-3-(benzo[b]thiophen-3-yl)propanoic acid
  C-term amino
XDXXDXAAFNXXXQ

SEQ ID NO: 1268 - protein, 14 aa, Artificial Sequence
  Description of Artificial Sequence: Synthetic peptide
  N-term Acetic Acid
  MOD_RES (1)..(1): (R)-2-allylpyrrolidine-2-carboxylic acid
  MOD_RES (3)..(3): (S)-2-amino-4,4-dimethylpentanoic acid
  MOD_RES (4)..(4): 2-amino-2-(pent-4-en-1-yl)hept-6-enoic acid
  MOD_RES (6)..(6): (S)-2-amino-3-((carboxymethyl)(3,3,3-trifluoropropyl)amino) propanoic acid
  MOD_RES (11)..(11): (S)-3-amino-1-((pent-4-en-1-yloxy)carbonyl)pyrrolidine-3- carboxylic acid
  MOD_RES (12)..(12): (S)-2-amino-3-(thiophen-3-yl)propanoic acid
  MOD_RES (13)..(13): (S)-2-amino-3-(benzo[b]thiophen-3-yl)propanoic acid
  C-term amino
XDXXDXAAFNXXXQ

SEQ ID NO: 1269 - protein, 14 aa, Artificial Sequence
  Description of Artificial Sequence: Synthetic peptide
  N-term Acetic Acid
  MOD_RES (1)..(1): (R)-2-allylpyrrolidine-2-carboxylic acid
  MOD_RES (3)..(3): (S)-2-amino-4,4-dimethylpentanoic acid
  MOD_RES (4)..(4): 2-amino-2-(pent-4-en-1-yl)hept-6-enoic acid
  MOD_RES (6)..(6): (S)-2-amino-3-((carboxymethyl)(2,2,2-trifluoroethyl)amino) propanoic acid
  MOD_RES (11)..(11): (S)-3-amino-1-((pent-4-en-1-yloxy)carbonyl)pyrrolidine-3- carboxylic acid
  MOD_RES (12)..(12): (S)-2-amino-3-(thiophen-3-yl)propanoic acid
  MOD_RES (13)..(13): (S)-2-amino-3-(benzo[b]thiophen-3-yl)propanoic acid
  C-term diethylamine
XDXXDXAAFNXXXQ

SEQ ID NO: 1270 - protein, 14 aa, Artificial Sequence
  Description of Artificial Sequence: Synthetic peptide
  N-term Acetic Acid
  MOD_RES (1)..(1): (R)-2-allylpyrrolidine-2-carboxylic acid
  MOD_RES (3)..(3): (S)-2-amino-4,4-dimethylpentanoic acid
  MOD_RES (4)..(4): 2-amino-2-(pent-4-en-1-yl)hept-6-enoic acid
  MOD_RES (6)..(6): (S)-2-amino-3-((carboxymethyl)(2,2,2-trifluoroethyl)amino) propanoic acid
  MOD_RES (11)..(11): (S)-3-amino-1-((pent-4-en-1-yloxy)carbonyl)pyrrolidine-3- carboxylic acid
  MOD_RES (12)..(12): (S)-2-amino-3-(thiophen-3-yl)propanoic acid
  MOD_RES (13)..(13): (S)-2-amino-3-(benzo[b]thiophen-3-yl)propanoic acid
  C-term cyclohexanamine
XDXXDXAAFNXXXQ

SEQ ID NO: 1271 - protein, 14 aa, Artificial Sequence
  Description of Artificial Sequence: Synthetic peptide
  N-term Acetic Acid
  MOD_RES (1)..(1): (R)-2-allylpyrrolidine-2-carboxylic acid
  MOD_RES (3)..(3): (S)-2-amino-4,4-dimethylpentanoic acid
  MOD_RES (4)..(4): 2-amino-2-(pent-4-en-1-yl)hept-6-enoic acid
  MOD_RES (7)..(7): N6-isopropyl-L-lysine
  MOD_RES (11)..(11): (S)-3-amino-1-((pent-4-en-1-yloxy)carbonyl)pyrrolidine-3- carboxylic acid
  MOD_RES (13)..(13): (S)-2-amino-3-(benzo[b]thiophen-3-yl)propanoic acid
  C-term amino
XNXXDQKAFLXFXK

SEQ ID NO: 1272 - protein, 14 aa, Artificial Sequence
  Description of Artificial Sequence: Synthetic peptide
  N-term Acetic Acid
  MOD_RES (1)..(1): (R)-2-allylpyrrolidine-2-carboxylic acid
  MOD_RES (3)..(3): (S)-2-amino-4,4-dimethylpentanoic acid
  MOD_RES (4)..(4): 2-amino-2-(pent-4-en-1-yl)hept-6-enoic acid
  MOD_RES (7)..(7): N6-isopropyl-L-lysine
  MOD_RES (11)..(11): (S)-3-amino-1-((pent-4-en-1-yloxy)carbonyl)pyrrolidine-3- carboxylic acid
  MOD_RES (13)..(13): (S)-2-amino-3-(benzo[b]thiophen-3-yl)propanoic acid
  MOD_RES (14)..(14): (S)-2-amino-4,4-dimethylpentanoic acid
  C-term amino
XNXXDQKAFLXFXX

SEQ ID NO: 1273 - protein, 14 aa, Artificial Sequence
  Description of Artificial Sequence: Synthetic peptide
  N-term Acetic Acid
  MOD_RES (1)..(1): (R)-2-allylpyrrolidine-2-carboxylic acid
  MOD_RES (3)..(3): (S)-2-amino-4,4-dimethylpentanoic acid
  MOD_RES (4)..(4): 2-amino-2-(pent-4-en-1-yl)hept-6-enoic acid
  MOD_RES (7)..(7): N6-isopropyl-L-lysine
  MOD_RES (11)..(11): (S)-3-amino-1-((pent-4-en-1-yloxy)carbonyl)pyrrolidine-3- carboxylic acid
  MOD_RES (13)..(13): (S)-2-amino-3-(benzo[b]thiophen-3-yl)propanoic acid
  MOD_RES (14)..(14): N6-isopropyl-L-lysine
  C-term amino
XNXXDQKAFLXFXK

SEQ ID NO: 1274 - protein, 14 aa, Artificial Sequence
  Description of Artificial Sequence: Synthetic peptide
  N-term Acetic Acid
  MOD_RES (1)..(1): (R)-2-allylpyrrolidine-2-carboxylic acid
  MOD_RES (3)..(3): (S)-2-amino-4,4-dimethylpentanoic acid
  MOD_RES (4)..(4): 2-amino-2-(pent-4-en-1-yl)hept-6-enoic acid
  MOD_RES (7)..(7): N6-isopropyl-L-lysine
  MOD_RES (11)..(11): (S)-3-amino-1-((pent-4-en-1-yloxy)carbonyl)pyrrolidine-3- carboxylic acid
  MOD_RES (13)..(13): (S)-2-amino-3-(benzo[b]thiophen-3-yl)propanoic acid
  MOD_RES (14)..(14): L-homoserine
  C-term amino
XNXXDQKAFLXFXS

SEQ ID NO: 1275 - protein, 14 aa, Artificial Sequence
  Description of Artificial Sequence: Synthetic peptide
  N-term Acetic Acid
  MOD_RES (1)..(1): (R)-2-allylpyrrolidine-2-carboxylic acid
  MOD_RES (4)..(4): 2-amino-2-(pent-4-en-1-yl)hept-6-enoic acid
  MOD_RES (7)..(7): N6-isopropyl-L-lysine
  MOD_RES (11)..(11): (S)-3-amino-1-((pent-4-en-1-yloxy)carbonyl)pyrrolidine-3- carboxylic acid
  MOD_RES (13)..(13): (S)-2-amino-3-(benzo[b]thiophen-3-yl)propanoic acid
  C-term amino
XNYXDQKAFLXFXQ

SEQ ID NO: 1276 - protein, 14 aa, Artificial Sequence
  Description of Artificial Sequence: Synthetic peptide
  N-term Acetic Acid
  MOD_RES (1)..(1): (R)-2-allylpyrrolidine-2-carboxylic acid
  MOD_RES (3)..(3): (S)-2-amino-3-cyclohexylpropanoic acid
  MOD_RES (4)..(4): 2-amino-2-(pent-4-en-1-yl)hept-6-enoic acid
  MOD_RES (7)..(7): N6-isopropyl-L-lysine
  MOD_RES (11)..(11): (S)-3-amino-1-((pent-4-en-1-yloxy)carbonyl)pyrrolidine-3- carboxylic acid
  MOD_RES (13)..(13): (S)-2-amino-3-(benzo[b]thiophen-3-yl)propanoic acid
  C-term amino
XNXXDQKAFLXFXQ

SEQ ID NO: 1277 - protein, 14 aa, Artificial Sequence
  Description of Artificial Sequence: Synthetic peptide
  N-term Acetic Acid
  MOD_RES (1)..(1): (R)-2-allylpyrrolidine-2-carboxylic acid
  MOD_RES (3)..(3): (S)-2-amino-4,4-dimethylpentanoic acid
  MOD_RES (4)..(4): 2-amino-2-(pent-4-en-1-yl)hept-6-enoic acid
  MOD_RES (7)..(7): N6-isopropyl-L-lysine
  MOD_RES (9)..(9): (S)-2-amino-3-cyclohexylpropanoic acid
  MOD_RES (11)..(11): (S)-3-amino-1-((pent-4-en-1-yloxy)carbonyl)pyrrolidine-3- carboxylic acid
  MOD_RES (13)..(13): (S)-2-amino-3-(benzo[b]thiophen-3-yl)propanoic acid
  C-term amino
XNXXDQKAXLXFXQ

SEQ ID NO: 1278 - protein, 14 aa, Artificial Sequence
  Description of Artificial Sequence: Synthetic peptide
  N-term Acetic Acid
  MOD_RES (1)..(1): (R)-2-allylpyrrolidine-2-carboxylic acid
  MOD_RES (3)..(3): (S)-2-amino-4,4-dimethylpentanoic acid
  MOD_RES (4)..(4): 2-amino-2-(pent-4-en-1-yl)hept-6-enoic acid
  MOD_RES (7)..(7): N6-isopropyl-L-lysine
  MOD_RES (10)..(10): (S)-2-amino-3-cyclohexylpropanoic acid
  MOD_RES (11)..(11): (S)-3-amino-1-((pent-4-en-1-yloxy)carbonyl)pyrrolidine-3- carboxylic acid
  MOD_RES (13)..(13): (S)-2-amino-3-(benzo[b]thiophen-3-yl)propanoic acid
  C-term amino
XNXXDQKAFXXFXQ

SEQ ID NO: 1279 - protein, 14 aa, Artificial Sequence
  Description of Artificial Sequence: Synthetic peptide
  N-term Acetic Acid
  MOD_RES (1)..(1): (R)-2-allylpyrrolidine-2-carboxylic acid
  MOD_RES (3)..(3): (S)-2-amino-4,4-dimethylpentanoic acid
  MOD_RES (4)..(4): 2-amino-2-(pent-4-en-1-yl)hept-6-enoic acid
  MOD_RES (7)..(7): N6-isopropyl-L-lysine
  MOD_RES (11)..(11): (S)-3-amino-1-((pent-4-en-1-yloxy)carbonyl)pyrrolidine-3- carboxylic acid
  MOD_RES (12)..(12): (S)-2-amino-3-cyclohexylpropanoic acid
  MOD_RES (13)..(13): (S)-2-amino-3-(benzo[b]thiophen-3-yl)propanoic acid
  C-term amino
XNXXDQKAFLXXXQ

SEQ ID NO: 1280 - protein, 14 aa, Artificial Sequence
  Description of Artificial Sequence: Synthetic peptide
  N-term Acetic Acid
  MOD_RES (1)..(1): (R)-2-allylpyrrolidine-2-carboxylic acid
  MOD_RES (3)..(3): (S)-2-amino-4,4-dimethylpentanoic acid
  MOD_RES (4)..(4): 2-amino-2-(pent-4-en-1-yl)hept-6-enoic acid
  MOD_RES (7)..(7): N6-isopropyl-L-lysine
  MOD_RES (11)..(11): (S)-3-amino-1-((pent-4-en-1-yloxy)carbonyl)pyrrolidine-3- carboxylic acid
  MOD_RES (13)..(13): (S)-2-amino-3-(benzo[b]thiophen-3-yl)propanoic acid
  MOD_RES (14)..(14): (S)-2-amino-3-cyclohexylpropanoic acid
  C-term amino
XNXXDQKAFLXFXX

SEQ ID NO: 1281 - protein, 14 aa, Artificial Sequence
  Description of Artificial Sequence: Synthetic peptide
  N-term Acetic Acid
  MOD_RES (1)..(1): (R)-2-allylpyrrolidine-2-carboxylic acid
  MOD_RES (3)..(3): (S)-2-amino-4,4-dimethylpentanoic acid
  MOD_RES (4)..(4): 2-amino-2-(pent-4-en-1-yl)hept-6-enoic acid
  MOD_RES (7)..(7): N6-isopropyl-L-lysine
  MOD_RES (10)..(10): N6-isopropyl-L-lysine
  MOD_RES (11)..(11): (S)-3-amino-1-((pent-4-en-1-yloxy)carbonyl)pyrrolidine-3- carboxylic acid
  MOD_RES (13)..(13): (S)-2-amino-3-(benzo[b]thiophen-3-yl)propanoic acid
  C-term amino
XNXXDQKAFKXFXQ

SEQ ID NO: 1282 - protein, 14 aa, Artificial Sequence
  Description of Artificial Sequence: Synthetic peptide
  N-term Acetic Acid
  MOD_RES (1)..(1): (R)-2-allylpyrrolidine-2-carboxylic acid
  MOD_RES (3)..(3): (S)-2-amino-4,4-dimethylpentanoic acid
  MOD_RES (4)..(4): 2-amino-2-(pent-4-en-1-yl)hept-6-enoic acid
  MOD_RES (7)..(7): N6-isopropyl-L-lysine
  MOD_RES (10)..(10): N6-isopropyl-L-lysine
  MOD_RES (11)..(11): (S)-3-amino-1-((pent-4-en-1-yloxy)carbonyl)pyrrolidine-3- carboxylic acid
  MOD_RES (13)..(13): (S)-2-amino-3-(benzo[b]thiophen-3-yl)propanoic acid
  MOD_RES (14)..(14): N6-isopropyl-L-lysine
  C-term amino
XNXXDQKAFKXFXK

SEQ ID NO: 1283 - protein, 14 aa, Artificial Sequence
  Description of Artificial Sequence: Synthetic peptide
  N-term Acetic Acid
  MOD_RES (1)..(1): (R)-2-allylpyrrolidine-2-carboxylic acid
  MOD_RES (3)..(3): (S)-2-amino-4,4-dimethylpentanoic acid
  MOD_RES (4)..(4): 2-amino-2-(pent-4-en-1-yl)hept-6-enoic acid
  MOD_RES (6)..(6): (S)-2-(2-amino-2-carboxyethyl)benzoic acid
  MOD_RES (11)..(11): (S)-3-amino-1-((pent-4-en-1-yloxy)carbonyl)pyrrolidine-3- carboxylic acid
  MOD_RES (12)..(12): (S)-2-amino-3-(2-(trifluoromethyl)phenyl)propanoic acid
  MOD_RES (13)..(13): (S)-2-amino-3-(benzo[b]thiophen-3-yl)propanoic acid
  C-term amino
XDXXDXAAFFXFXQ

SEQ ID NO: 1284 - protein, 14 aa, Artificial Sequence
  Description of Artificial Sequence: Synthetic peptide
  N-term Acetic Acid
  MOD_RES (1)..(1): (R)-2-allylpyrrolidine-2-carboxylic acid
  MOD_RES (3)..(3): (S)-2-amino-4,4-dimethylpentanoic acid
  MOD_RES (4)..(4): 2-amino-2-(pent-4-en-1-yl)hept-6-enoic acid
  MOD_RES (6)..(6): (S)-2-(2-amino-2-carboxyethyl)benzoic acid
  MOD_RES (11)..(11): (S)-3-amino-1-((pent-4-en-1-yloxy)carbonyl)pyrrolidine-3- carboxylic acid
  MOD_RES (12)..(12): (S)-2-amino-3-(2-(trifluoromethyl)phenyl)propanoic acid
  MOD_RES (13)..(13): (S)-2-amino-3-(benzo[b]thiophen-3-yl)propanoic acid
  C-term amino
XDXXDXAAFLXFXQ

SEQ ID NO: 1285 - protein, 14 aa, Artificial Sequence
  Description of Artificial Sequence: Synthetic peptide
  N-term Acetic Acid
  MOD_RES (1)..(1): (R)-2-allylpyrrolidine-2-carboxylic acid
  MOD_RES (3)..(3): (S)-2-amino-4,4-dimethylpentanoic acid
  MOD_RES (4)..(4): 2-amino-2-(pent-4-en-1-yl)hept-6-enoic acid
  MOD_RES (6)..(6): (S)-2-(2-amino-2-carboxyethyl)benzoic acid
  MOD_RES (11)..(11): (S)-3-amino-1-((pent-4-en-1-yloxy)carbonyl)pyrrolidine-3- carboxylic acid
  MOD_RES (12)..(12): (S)-2-amino-3-(2-chlorophenyl)propanoic acid
  MOD_RES (13)..(13): (S)-2-amino-3-(benzo[b]thiophen-3-yl)propanoic acid
  C-term amino
XDXXDXAAFFXFXQ

SEQ ID NO: 1286 - protein, 14 aa, Artificial Sequence
  Description of Artificial Sequence: Synthetic peptide
  N-term Acetic Acid
  MOD_RES (1)..(1): (R)-2-allylpyrrolidine-2-carboxylic acid
  MOD_RES (3)..(3): (S)-2-amino-4,4-dimethylpentanoic acid
  MOD_RES (4)..(4): 2-amino-2-(pent-4-en-1-yl)hept-6-enoic acid
  MOD_RES (6)..(6): (S)-2-(2-amino-2-carboxyethyl)benzoic acid
  MOD_RES (11)..(11): (S)-3-amino-1-((pent-4-en-1-yloxy)carbonyl)pyrrolidine-3- carboxylic acid
  MOD_RES (12)..(12): (S)-2-amino-3-(2-chlorophenyl)propanoic acid
  MOD_RES (13)..(13): (S)-2-amino-3-(benzo[b]thiophen-3-yl)propanoic acid
  C-term amino
XDXXDXAAFLXFXQ

SEQ ID NO: 1287 - protein, 14 aa, Artificial Sequence
  Description of Artificial Sequence: Synthetic peptide
  N-term Acetic Acid
  MOD_RES (1)..(1): (R)-2-allylpyrrolidine-2-carboxylic acid
  MOD_RES (3)..(3): (S)-2-amino-4,4-dimethylpentanoic acid
  MOD_RES (4)..(4): 2-amino-2-(pent-4-en-1-yl)hept-6-enoic acid
  MOD_RES (6)..(6): (S)-2-(2-amino-2-carboxyethyl)benzoic acid
  MOD_RES (11)..(11): (S)-3-amino-1-((pent-4-en-1-yloxy)carbonyl)pyrrolidine-3- carboxylic acid
  MOD_RES (12)..(12): (S)-2-amino-3-(2-(trifluoromethyl)phenyl)propanoic acid
  MOD_RES (13)..(13): (S)-2-amino-3-(benzo[b]thiophen-3-yl)propanoic acid
  C-term amino
XDXXDXAAFFXFXS

SEQ ID NO: 1288 - protein, 14 aa, Artificial Sequence
  Description of Artificial Sequence: Synthetic peptide
  N-term Acetic Acid
  MOD_RES (1)..(1): (R)-2-allylpyrrolidine-2-carboxylic acid
  MOD_RES (3)..(3): (S)-2-amino-4,4-dimethylpentanoic acid
  MOD_RES (4)..(4): 2-amino-2-(pent-4-en-1-yl)hept-6-enoic acid
  MOD_RES (6)..(6): (S)-2-(2-amino-2-carboxyethyl)benzoic acid
  MOD_RES (11)..(11): (S)-3-amino-1-((pent-4-en-1-yloxy)carbonyl)pyrrolidine-3- carboxylic acid
  MOD_RES (12)..(12): (S)-2-amino-3-(2-(trifluoromethyl)phenyl)propanoic acid
  MOD_RES (13)..(13): (S)-2-amino-3-(benzo[b]thiophen-3-yl)propanoic acid
  C-term amino
XDXXDXAAFLXFXS

SEQ ID NO: 1289 - protein, 14 aa, Artificial Sequence
  Description of Artificial Sequence: Synthetic peptide
  N-term Acetic Acid
  MOD_RES (1)..(1): (R)-2-allylpyrrolidine-2-carboxylic acid
  MOD_RES (3)..(3): (S)-2-amino-4,4-dimethylpentanoic acid
  MOD_RES (4)..(4): 2-amino-2-(pent-4-en-1-yl)hept-6-enoic acid
  MOD_RES (6)..(6): (S)-2-(2-amino-2-carboxyethyl)benzoic acid
  MOD_RES (11)..(11): (S)-3-amino-1-((pent-4-en-1-yloxy)carbonyl)pyrrolidine-3- carboxylic acid
  MOD_RES (12)..(12): (S)-2-amino-3-(2-chlorophenyl)propanoic acid
  MOD_RES (13)..(13): (S)-2-amino-3-(benzo[b]thiophen-3-yl)propanoic acid
  C-term amino
XDXXDXAAFFXFXS

SEQ ID NO: 1290 - protein, 14 aa, Artificial Sequence
  Description of Artificial Sequence: Synthetic peptide
  N-term Acetic Acid
  MOD_RES (1)..(1): (R)-2-allylpyrrolidine-2-carboxylic acid
  MOD_RES (3)..(3): (S)-2-amino-4,4-dimethylpentanoic acid
  MOD_RES (4)..(4): 2-amino-2-(pent-4-en-1-yl)hept-6-enoic acid
  MOD_RES (6)..(6): (S)-2-(2-amino-2-carboxyethyl)benzoic acid
  MOD_RES (11)..(11): (S)-3-amino-1-((pent-4-en-1-yloxy)carbonyl)pyrrolidine-3- carboxylic acid
  MOD_RES (12)..(12): (S)-2-amino-3-(2-chlorophenyl)propanoic acid
  MOD_RES (13)..(13): (S)-2-amino-3-(benzo[b]thiophen-3-yl)propanoic acid
  C-term amino
XDXXDXAAFLXFXS

SEQ ID NO: 1291 - protein, 14 aa, Artificial Sequence
  Description of Artificial Sequence: Synthetic peptide
  N-term Acetic Acid
  MOD_RES (1)..(1): (R)-2-allylpyrrolidine-2-carboxylic acid
  MOD_RES (3)..(3): (S)-2-amino-4,4-dimethylpentanoic acid
  MOD_RES (4)..(4): 2-amino-2-(pent-4-en-1-yl)hept-6-enoic acid
  MOD_RES (6)..(6): (S)-2-(2-amino-2-carboxyethyl)benzoic acid
  MOD_RES (11)..(11): (S)-3-amino-1-((pent-4-en-1-yloxy)carbonyl)pyrrolidine-3- carboxylic acid
  MOD_RES (12)..(12): (S)-2-amino-3-(thiophen-3-yl)propanoic acid
  MOD_RES (13)..(13): (S)-2-amino-3-(benzo[b]thiophen-3-yl)propanoic acid
  C-term amino
XDXXDXAAFFXXXS

SEQ ID NO: 1292 - protein, 14 aa, Artificial Sequence
  Description of Artificial Sequence: Synthetic peptide
  N-term Acetic Acid
  MOD_RES (1)..(1): (R)-2-allylpyrrolidine-2-carboxylic acid
  MOD_RES (3)..(3): (S)-2-amino-4,4-dimethylpentanoic acid
  MOD_RES (4)..(4): 2-amino-2-(pent-4-en-1-yl)hept-6-enoic acid
  MOD_RES (6)..(6): (S)-2-(2-amino-2-carboxyethyl)benzoic acid
  MOD_RES (11)..(11): (S)-3-amino-1-((pent-4-en-1-yloxy)carbonyl)pyrrolidine-3- carboxylic acid
  MOD_RES (12)..(12): (S)-2-amino-3-(thiophen-3-yl)propanoic acid
  MOD_RES (13)..(13): (S)-2-amino-3-(benzo[b]thiophen-3-yl)propanoic acid
  C-term amino
XDXXDXAAFLXXXS

SEQ ID NO: 1293 - protein, 13 aa, Artificial Sequence
  Description of Artificial Sequence: Synthetic peptide
  N-term Acetic Acid
  MOD_RES (1)..(1): (R)-2-allylpyrrolidine-2-carboxylic acid
  MOD_RES (3)..(3): (S)-2-amino-4,4-dimethylpentanoic acid
  MOD_RES (4)..(4): 2-amino-2-(pent-4-en-1-yl)hept-6-enoic acid
  MOD_RES (6)..(6): (S)-2-(2-amino-2-carboxyethyl)benzoic acid
  MOD_RES (11)..(11): (S)-3-amino-1-((pent-4-en-1-yloxy)carbonyl)pyrrolidine-3- carboxylic acid
  MOD_RES (12)..(12): (S)-2-amino-3-(thiophen-3-yl)propanoic acid
  MOD_RES (13)..(13): (S)-2-amino-3-(benzo[b]thiophen-3-yl)propanoic acid
  C-term (2R,3R)-2-aminobutane-1,3-diol
XDXXDXAAFFXXX

SEQ ID NO: 1294 - protein, 13 aa, Artificial Sequence
  Description of Artificial Sequence: Synthetic peptide
  N-term Acetic Acid
  MOD_RES (1)..(1): (R)-2-allylpyrrolidine-2-carboxylic acid
  MOD_RES (3)..(3): (S)-2-amino-4,4-dimethylpentanoic acid
  MOD_RES (4)..(4): 2-amino-2-(pent-4-en-1-yl)hept-6-enoic acid
  MOD_RES (6)..(6): (S)-2-(2-amino-2-carboxyethyl)benzoic acid
  MOD_RES (11)..(11): (S)-3-amino-1-((pent-4-en-1-yloxy)carbonyl)pyrrolidine-3- carboxylic acid
  MOD_RES (12)..(12): (S)-2-amino-3-(thiophen-3-yl)propanoic acid
  MOD_RES (13)..(13): (S)-2-amino-3-(benzo[b]thiophen-3-yl)propanoic acid
  C-term (2R,3R)-2-aminobutane-1,3-diol
XDXXDXAAFLXXX

SEQ ID NO: 1295 - protein, 14 aa, Artificial Sequence
  Description of Artificial Sequence: Synthetic peptide
  N-term Acetic Acid
  MOD_RES (1)..(1): (R)-2-allylpyrrolidine-2-carboxylic acid
  MOD_RES (3)..(3): (S)-2-amino-4,4-dimethylpentanoic acid
  MOD_RES (4)..(4): 2-amino-2-(pent-4-en-1-yl)hept-6-enoic acid
  MOD_RES (6)..(6): (S)-3-(2-amino-2-carboxyethyl)benzoic acid
  MOD_RES (11)..(11): (S)-3-amino-1-((pent-4-en-1-yloxy)carbonyl)pyrrolidine-3- carboxylic acid
  MOD_RES (12)..(12): (S)-2-amino-3-(2-chlorophenyl)propanoic acid
  MOD_RES (13)..(13): (S)-2-amino-3-(benzo[b]thiophen-3-yl)propanoic acid
  C-term ethanamine
XDXXDXAAFLXFXQ

SEQ ID NO: 1296 - protein, 14 aa, Artificial Sequence
  Description of Artificial Sequence: Synthetic peptide
  N-term Acetic Acid
  MOD_RES (1)..(1): (R)-2-allylpyrrolidine-2-carboxylic acid
  MOD_RES (3)..(3): (S)-2-amino-4,4-dimethylpentanoic acid
  MOD_RES (4)..(4): 2-amino-2-(pent-4-en-1-yl)hept-6-enoic acid
  MOD_RES (6)..(6): (S)-3-(2-amino-2-carboxyethyl)benzoic acid
  MOD_RES (11)..(11): (S)-3-amino-1-((pent-4-en-1-yloxy)carbonyl)pyrrolidine-3- carboxylic acid
  MOD_RES (12)..(12): (S)-2-amino-3-(2-chlorophenyl)propanoic acid
  MOD_RES (13)..(13): (S)-2-amino-3-(benzo[b]thiophen-3-yl)propanoic acid
  C-term (S)-2-aminopropan-1-ol
XDXXDXAAFLXFXQ

SEQ ID NO: 1297 - protein, 14 aa, Artificial Sequence
  Description of Artificial Sequence: Synthetic peptide
  N-term Acetic Acid
  MOD_RES (1)..(1): (R)-2-allylpyrrolidine-2-carboxylic acid
  MOD_RES (3)..(3): (S)-2-amino-4,4-dimethylpentanoic acid
  MOD_RES (4)..(4): 2-amino-2-(pent-4-en-1-yl)hept-6-enoic acid
  MOD_RES (6)..(6): (S)-3-(2-amino-2-carboxyethyl)benzoic acid
  MOD_RES (11)..(11): (S)-3-amino-1-((pent-4-en-1-yloxy)carbonyl)pyrrolidine-3- carboxylic acid
  MOD_RES (12)..(12): (S)-2-amino-3-(2-chlorophenyl)propanoic acid
  MOD_RES (13)..(13): (S)-2-amino-3-(benzo[b]thiophen-3-yl)propanoic acid
  C-term (S)-2-amino-3-phenylpropan-1-ol
XDXXDXAAFLXFXQ

SEQ ID NO: 1298 - protein, 14 aa, Artificial Sequence
  Description of Artificial Sequence: Synthetic peptide
  N-term Acetic Acid
  MOD_RES (1)..(1): (R)-2-allylpyrrolidine-2-carboxylic acid
  MOD_RES (3)..(3): (S)-2-amino-4,4-dimethylpentanoic acid
  MOD_RES (4)..(4): 2-amino-2-(pent-4-en-1-yl)hept-6-enoic acid
  MOD_RES (6)..(6): (S)-3-(2-amino-2-carboxyethyl)benzoic acid
  MOD_RES (11)..(11): (S)-3-amino-1-((pent-4-en-1-yloxy)carbonyl)pyrrolidine-3- carboxylic acid
  MOD_RES (12)..(12): (S)-2-amino-3-(2-chlorophenyl)propanoic acid
  MOD_RES (13)..(13): (S)-2-amino-3-(benzo[b]thiophen-3-yl)propanoic acid
  C-term (S)-pyrrolidin-2-ylmethanol
XDXXDXAAFLXFXQ

SEQ ID NO: 1299 - protein, 14 aa, Artificial Sequence
  Description of Artificial Sequence: Synthetic peptide
  N-term Acetic Acid
  MOD_RES (1)..(1): (R)-2-allylpyrrolidine-2-carboxylic acid
  MOD_RES (3)..(3): (S)-2-amino-4,4-dimethylpentanoic acid
  MOD_RES (4)..(4): 2-amino-2-(pent-4-en-1-yl)hept-6-enoic acid
  MOD_RES (6)..(6): (S)-3-(2-amino-2-carboxyethyl)benzoic acid
  MOD_RES (11)..(11): (S)-3-amino-1-((pent-4-en-1-yloxy)carbonyl)pyrrolidine-3- carboxylic acid
  MOD_RES (12)..(12): (S)-2-amino-3-(2-chlorophenyl)propanoic acid
  MOD_RES (13)..(13): (S)-2-amino-3-(benzo[b]thiophen-3-yl)propanoic acid
  C-term (S)-2-amino-4-methylpentan-1-ol
XDXXDXAAFLXFXQ

SEQ ID NO: 1300 - protein, 14 aa, Artificial Sequence
  Description of Artificial Sequence: Synthetic peptide
  N-term Acetic Acid
  MOD_RES (1)..(1): (R)-2-allylpyrrolidine-2-carboxylic acid
  MOD_RES (3)..(3): (S)-2-amino-4,4-dimethylpentanoic acid
  MOD_RES (4)..(4): 2-amino-2-(pent-4-en-1-yl)hept-6-enoic acid
  MOD_RES (6)..(6): (S)-3-(2-amino-2-carboxyethyl)benzoic acid
  MOD_RES (11)..(11): (S)-3-amino-1-((pent-4-en-1-yloxy)carbonyl)pyrrolidine-3- carboxylic acid
  MOD_RES (12)..(12): (S)-2-amino-3-(2-chlorophenyl)propanoic acid
  MOD_RES (13)..(13): (S)-2-amino-3-(benzo[b]thiophen-3-yl)propanoic acid
  C-term (2R,3R)-2-aminobutane-1,3-diol
XDXXDXAAFLXFXQ

SEQ ID NO: 1301 - protein, 14 aa, Artificial Sequence
  Description of Artificial Sequence: Synthetic peptide
  N-term Acetic Acid
  MOD_RES (1)..(1): (R)-2-allylpyrrolidine-2-carboxylic acid
  MOD_RES (3)..(3): (S)-2-amino-4,4-dimethylpentanoic acid
  MOD_RES (4)..(4): 2-amino-2-(pent-4-en-1-yl)hept-6-enoic acid
  MOD_RES (6)..(6): (S)-2-amino-3-((carboxymethyl)(2,2,2-trifluoroethyl)amino) propanoic acid
  MOD_RES (11)..(11): (S)-3-amino-1-((pent-4-en-1-yloxy)carbonyl)pyrrolidine-3- carboxylic acid
  MOD_RES (12)..(12): (S)-2-amino-3-(thiophen-3-yl)propanoic acid
  MOD_RES (13)..(13): (S)-2-amino-3-(benzo[b]thiophen-3-yl)propanoic acid
  C-term ethanamine
XDXXDXAAFLXXXQ

SEQ ID NO: 1302 - protein, 14 aa, Artificial Sequence
  Description of Artificial Sequence: Synthetic peptide
  N-term Acetic Acid
  MOD_RES (1)..(1): (R)-2-allylpyrrolidine-2-carboxylic acid
  MOD_RES (3)..(3): (S)-2-amino-4,4-dimethylpentanoic acid
  MOD_RES (4)..(4): 2-amino-2-(pent-4-en-1-yl)hept-6-enoic acid
  MOD_RES (6)..(6): (S)-2-amino-3-((carboxymethyl)(2,2,2-trifluoroethyl)amino) propanoic acid
  MOD_RES (11)..(11): (S)-3-amino-1-((pent-4-en-1-yloxy)carbonyl)pyrrolidine-3- carboxylic acid
  MOD_RES (12)..(12): (S)-2-amino-3-(thiophen-3-yl)propanoic acid
  MOD_RES (13)..(13): (S)-2-amino-3-(benzo[b]thiophen-3-yl)propanoic acid
  C-term (S)-2-aminopropan-1-ol
XDXXDXAAFLXXXQ

SEQ ID NO: 1303 - protein, 14 aa, Artificial Sequence
  Description of Artificial Sequence: Synthetic peptide
  N-term Acetic Acid
  MOD_RES (1)..(1): (R)-2-allylpyrrolidine-2-carboxylic acid
  MOD_RES (3)..(3): (S)-2-amino-4,4-dimethylpentanoic acid
  MOD_RES (4)..(4): 2-amino-2-(pent-4-en-1-yl)hept-6-enoic acid
  MOD_RES (6)..(6): (S)-2-amino-3-((carboxymethyl)(2,2,2-trifluoroethyl)amino) propanoic acid
  MOD_RES (11)..(11): (S)-3-amino-1-((pent-4-en-1-yloxy)carbonyl)pyrrolidine-3- carboxylic acid
  MOD_RES (12)..(12): (S)-2-amino-3-(thiophen-3-yl)propanoic acid
  MOD_RES (13)..(13): (S)-2-amino-3-(benzo[b]thiophen-3-yl)propanoic acid
  C-term (S)-2-amino-3-phenylpropan-1-ol
XDXXDXAAFLXXXQ

SEQ ID NO: 1304 - protein, 14 aa, Artificial Sequence
  Description of Artificial Sequence: Synthetic peptide
  N-term Acetic Acid
  MOD_RES (1)..(1): (R)-2-allylpyrrolidine-2-carboxylic acid
  MOD_RES (3)..(3): (S)-2-amino-4,4-dimethylpentanoic acid
  MOD_RES (4)..(4): 2-amino-2-(pent-4-en-1-yl)hept-6-enoic acid
  MOD_RES (6)..(6): (S)-2-amino-3-((carboxymethyl)(2,2,2-trifluoroethyl)amino) propanoic acid
  MOD_RES (11)..(11): (S)-3-amino-1-((pent-4-en-1-yloxy)carbonyl)pyrrolidine-3- carboxylic acid
  MOD_RES (12)..(12): (S)-2-amino-3-(thiophen-3-yl)propanoic acid
  MOD_RES (13)..(13): (S)-2-amino-3-(benzo[b]thiophen-3-yl)propanoic acid
  C-term (S)-pyrrolidin-2-ylmethanol
XDXXDXAAFLXXXQ

SEQ ID NO: 1305 - protein, 14 aa, Artificial Sequence
  Description of Artificial Sequence: Synthetic peptide
  N-term Acetic Acid
  MOD_RES (1)..(1): (R)-2-allylpyrrolidine-2-carboxylic acid
  MOD_RES (3)..(3): (S)-2-amino-4,4-dimethylpentanoic acid
  MOD_RES (4)..(4): 2-amino-2-(pent-4-en-1-yl)hept-6-enoic acid
  MOD_RES (6)..(6): (S)-2-amino-3-((carboxymethyl)(2,2,2-trifluoroethyl)amino) propanoic acid
  MOD_RES (11)..(11): (S)-3-amino-1-((pent-4-en-1-yloxy)carbonyl)pyrrolidine-3- carboxylic acid
  MOD_RES (12)..(12): (S)-2-amino-3-(thiophen-3-yl)propanoic acid
  MOD_RES (13)..(13): (S)-2-amino-3-(benzo[b]thiophen-3-yl)propanoic acid
  C-term (S)-2-amino-4-methylpentan-1-ol
XDXXDXAAFLXXXQ

SEQ ID NO: 1306 - protein, 14 aa, Artificial Sequence
  Description of Artificial Sequence: Synthetic peptide
  N-term Acetic Acid
  MOD_RES (1)..(1): (R)-2-allylpyrrolidine-2-carboxylic acid
  MOD_RES (3)..(3): (S)-2-amino-4,4-dimethylpentanoic acid
  MOD_RES (4)..(4): 2-amino-2-(pent-4-en-1-yl)hept-6-enoic acid
  MOD_RES (6)..(6): (S)-2-amino-3-((carboxymethyl)(2,2,2-trifluoroethyl)amino) propanoic acid
  MOD_RES (11)..(11): (S)-3-amino-1-((pent-4-en-1-yloxy)carbonyl)pyrrolidine-3- carboxylic acid
  MOD_RES (12)..(12): (S)-2-amino-3-(thiophen-3-yl)propanoic acid
  MOD_RES (13)..(13): (S)-2-amino-3-(benzo[b]thiophen-3-yl)propanoic acid
  C-term (2R,3R)-2-aminobutane-1,3-diol
XDXXDXAAFLXXXQ

SEQ ID NO: 1307 - protein, 14 aa, Artificial Sequence
  Description of Artificial Sequence: Synthetic peptide
  N-term Acetic Acid
  MOD_RES (1)..(1): (R)-2-allylpyrrolidine-2-carboxylic acid
  MOD_RES (3)..(3): (S)-2-amino-4,4-dimethylpentanoic acid
  MOD_RES (4)..(4): 2-amino-2-(pent-4-en-1-yl)hept-6-enoic acid
  MOD_RES (6)..(6): (S)-3-(2-amino-2-carboxyethyl)benzoic acid
  MOD_RES (11)..(11): (S)-3-amino-1-((pent-4-en-1-yloxy)carbonyl)pyrrolidine-3- carboxylic acid
  MOD_RES (12)..(12): (S)-2-amino-3-(2-chlorophenyl)propanoic acid
  MOD_RES (13)..(13): (S)-2-amino-3-(benzo[b]thiophen-3-yl)propanoic acid
  C-term amino
XDXXDXGAFLXFXQ

SEQ ID NO: 1308 - protein, 14 aa, Artificial Sequence
  Description of Artificial Sequence: Synthetic peptide
  N-term Acetic Acid
  MOD_RES (1)..(1): (R)-2-allylpyrrolidine-2-carboxylic acid
  MOD_RES (3)..(3): (S)-2-amino-4,4-dimethylpentanoic acid
  MOD_RES (4)..(4): 2-amino-2-(pent-4-en-1-yl)hept-6-enoic acid
  MOD_RES (6)..(6): (S)-3-(2-amino-2-carboxyethyl)benzoic acid
  MOD_RES (7)..(7): (S)-2-aminohexanoic acid
  MOD_RES (11)..(11): (S)-3-amino-1-((pent-4-en-1-yloxy)carbonyl)pyrrolidine-3- carboxylic acid
  MOD_RES (12)..(12): (S)-2-amino-3-(2-chlorophenyl)propanoic acid
  MOD_RES (13)..(13): (S)-2-amino-3-(benzo[b]thiophen-3-yl)propanoic acid
  C-term amino
XDXXDXXAFLXFXQ

SEQ ID NO: 1309 - protein, 14 aa, Artificial Sequence
  Description of Artificial Sequence: Synthetic peptide
  N-term Acetic Acid
  MOD_RES (1)..(1): (R)-2-allylpyrrolidine-2-carboxylic acid
  MOD_RES (3)..(3): (S)-2-amino-4,4-dimethylpentanoic acid
  MOD_RES (4)..(4): 2-amino-2-(pent-4-en-1-yl)hept-6-enoic acid
  MOD_RES (6)..(6): (S)-3-(2-amino-2-carboxyethyl)benzoic acid
  MOD_RES (7)..(7): 2-amino-2-methylpropanoic acid
  MOD_RES (11)..(11): (S)-3-amino-1-((pent-4-en-1-yloxy)carbonyl)pyrrolidine-3- carboxylic acid
  MOD_RES (12)..(12): (S)-2-amino-3-(2-chlorophenyl)propanoic acid
  MOD_RES (13)..(13): (S)-2-amino-3-(benzo[b]thiophen-3-yl)propanoic acid
  C-term amino
XDXXDXXAFLXFXQ

SEQ ID NO: 1310 - protein, 14 aa, Artificial Sequence
  Description of Artificial Sequence: Synthetic peptide
  N-term Acetic Acid
  MOD_RES (1)..(1): (R)-2-allylpyrrolidine-2-carboxylic acid
  MOD_RES (3)..(3): (S)-2-amino-4,4-dimethylpentanoic acid
  MOD_RES (4)..(4): 2-amino-2-(pent-4-en-1-yl)hept-6-enoic acid
  MOD_RES (6)..(6): (S)-3-(2-amino-2-carboxyethyl)benzoic acid
  MOD_RES (11)..(11): (S)-3-amino-1-((pent-4-en-1-yloxy)carbonyl)pyrrolidine-3- carboxylic acid
  MOD_RES (12)..(12): (S)-2-amino-3-(2-chlorophenyl)propanoic acid
  MOD_RES (13)..(13): (S)-2-amino-3-(benzo[b]thiophen-3-yl)propanoic acid
  C-term amino
XDXXDXAGFLXFXQ

SEQ ID NO: 1311 - protein, 14 aa, Artificial Sequence
  Description of Artificial Sequence: Synthetic peptide
  N-term Acetic Acid
  MOD_RES (1)..(1): (R)-2-allylpyrrolidine-2-carboxylic acid
  MOD_RES (3)..(3): (S)-2-amino-4,4-dimethylpentanoic acid
  MOD_RES (4)..(4): 2-amino-2-(pent-4-en-1-yl)hept-6-enoic acid
  MOD_RES (6)..(6): (S)-3-(2-amino-2-carboxyethyl)benzoic acid
  MOD_RES (7)..(7): (S)-2-aminohexanoic acid
  MOD_RES (11)..(11): (S)-3-amino-1-((pent-4-en-1-yloxy)carbonyl)pyrrolidine-3- carboxylic acid
  MOD_RES (12)..(12): (S)-2-amino-3-(2-chlorophenyl)propanoic acid
  MOD_RES (13)..(13): (S)-2-amino-3-(benzo[b]thiophen-3-yl)propanoic acid
  C-term amino
XDXXDXXGFLXFXQ

SEQ ID NO: 1312 - protein, 14 aa, Artificial Sequence
  Description of Artificial Sequence: Synthetic peptide
  N-term Acetic Acid
  MOD_RES (1)..(1): (R)-2-allylpyrrolidine-2-carboxylic acid
  MOD_RES (3)..(3): (S)-2-amino-4,4-dimethylpentanoic acid
  MOD_RES (4)..(4): 2-amino-2-(pent-4-en-1-yl)hept-6-enoic acid
  MOD_RES (6)..(6): (S)-3-(2-amino-2-carboxyethyl)benzoic acid
  MOD_RES (7)..(7): 2-amino-2-methylpropanoic acid
  MOD_RES (11)..(11): (S)-3-amino-1-((pent-4-en-1-yloxy)carbonyl)pyrrolidine-3- carboxylic acid
  MOD_RES (12)..(12): (S)-2-amino-3-(2-chlorophenyl)propanoic acid
  MOD_RES (13)..(13): (S)-2-amino-3-(benzo[b]thiophen-3-yl)propanoic acid
  C-term amino
XDXXDXXGFLXFXQ

SEQ ID NO: 1313 - protein, 14 aa, Artificial Sequence
  Description of Artificial Sequence: Synthetic peptide
  N-term Acetic Acid
  MOD_RES (1)..(1): (R)-2-allylpyrrolidine-2-carboxylic acid
  MOD_RES (3)..(3): (S)-2-amino-4,4-dimethylpentanoic acid
  MOD_RES (4)..(4): 2-amino-2-(pent-4-en-1-yl)hept-6-enoic acid
  MOD_RES (6)..(6): (S)-2-amino-3-((carboxymethyl)(2,2,2-trifluoroethyl)amino) propanoic acid
  MOD_RES (11)..(11): (S)-3-amino-1-((pent-4-en-1-yloxy)carbonyl)pyrrolidine-3- carboxylic acid
  MOD_RES (12)..(12): (S)-2-amino-3-(2-chlorophenyl)propanoic acid
  MOD_RES (13)..(13): (S)-2-amino-3-(benzo[b]thiophen-3-yl)propanoic acid
  C-term amino
XDXXDXGAFTXFXQ

SEQ ID NO: 1314 - protein, 14 aa, Artificial Sequence
  Description of Artificial Sequence: Synthetic peptide
  N-term Acetic Acid
  MOD_RES (1)..(1): (R)-2-allylpyrrolidine-2-carboxylic acid
  MOD_RES (3)..(3): (S)-2-amino-4,4-dimethylpentanoic acid
  MOD_RES (4)..(4): 2-amino-2-(pent-4-en-1-yl)hept-6-enoic acid
  MOD_RES (6)..(6): (S)-2-amino-3-((carboxymethyl)(2,2,2-trifluoroethyl)amino) propanoic acid
  MOD_RES (7)..(7): (S)-2-aminohexanoic acid
  MOD_RES (11)..(11): (S)-3-amino-1-((pent-4-en-1-yloxy)carbonyl)pyrrolidine-3- carboxylic acid
  MOD_RES (12)..(12): (S)-2-amino-3-(2-chlorophenyl)propanoic acid
  MOD_RES (13)..(13): (S)-2-amino-3-(benzo[b]thiophen-3-yl)propanoic acid
  C-term amino
XDXXDXXAFTXFXQ

SEQ ID NO: 1315 - protein, 14 aa, Artificial Sequence
  Description of Artificial Sequence: Synthetic peptide
  N-term Acetic Acid
  MOD_RES (1)..(1): (R)-2-allylpyrrolidine-2-carboxylic acid
  MOD_RES (3)..(3): (S)-2-amino-4,4-dimethylpentanoic acid
  MOD_RES (4)..(4): 2-amino-2-(pent-4-en-1-yl)hept-6-enoic acid
  MOD_RES (6)..(6): (S)-2-amino-3-((carboxymethyl)(2,2,2-trifluoroethyl)amino) propanoic acid
  MOD_RES (7)..(7): 2-amino-2-methylpropanoic acid
  MOD_RES (11)..(11): (S)-3-amino-1-((pent-4-en-1-yloxy)carbonyl)pyrrolidine-3- carboxylic acid
  MOD_RES (12)..(12): (S)-2-amino-3-(2-chlorophenyl)propanoic acid
  MOD_RES (13)..(13): (S)-2-amino-3-(benzo[b]thiophen-3-yl)propanoic acid
  C-term amino
XDXXDXXAFTXFXQ

SEQ ID NO: 1316 - protein, 14 aa, Artificial Sequence
  Description of Artificial Sequence: Synthetic peptide
  N-term Acetic Acid
  MOD_RES (1)..(1): (R)-2-allylpyrrolidine-2-carboxylic acid
  MOD_RES (3)..(3): (S)-2-amino-4,4-dimethylpentanoic acid
  MOD_RES (4)..(4): 2-amino-2-(pent-4-en-1-yl)hept-6-enoic acid
  MOD_RES (6)..(6): (S)-2-amino-3-((carboxymethyl)(2,2,2-trifluoroethyl)amino) propanoic acid
  MOD_RES (11)..(11): (S)-3-amino-1-((pent-4-en-1-yloxy)carbonyl)pyrrolidine-3- carboxylic acid
  MOD_RES (12)..(12): (S)-2-amino-3-(2-chlorophenyl)propanoic acid
  MOD_RES (13)..(13): (S)-2-amino-3-(benzo[b]thiophen-3-yl)propanoic acid
  C-term amino
XDXXDXAGFTXFXQ

SEQ ID NO: 1317 - protein, 14 aa, Artificial Sequence
  Description of Artificial Sequence: Synthetic peptide
  N-term Acetic Acid
  MOD_RES (1)..(1): (R)-2-allylpyrrolidine-2-carboxylic acid
  MOD_RES (3)..(3): (S)-2-amino-4,4-dimethylpentanoic acid
  MOD_RES (4)..(4): 2-amino-2-(pent-4-en-1-yl)hept-6-enoic acid
  MOD_RES (6)..(6): (S)-2-amino-3-((carboxymethyl)(2,2,2-trifluoroethyl)amino) propanoic acid
  MOD_RES (7)..(7): (S)-2-aminohexanoic acid
  MOD_RES (11)..(11): (S)-3-amino-1-((pent-4-en-1-yloxy)carbonyl)pyrrolidine-3- carboxylic acid
  MOD_RES (12)..(12): (S)-2-amino-3-(2-chlorophenyl)propanoic acid
  MOD_RES (13)..(13): (S)-2-amino-3-(benzo[b]thiophen-3-yl)propanoic acid
  C-term amino
XDXXDXXGFTXFXQ

SEQ ID NO: 1318 - protein, 14 aa, Artificial Sequence
  Description of Artificial Sequence: Synthetic peptide
  N-term Acetic Acid
  MOD_RES (1)..(1): (R)-2-allylpyrrolidine-2-carboxylic acid
  MOD_RES (3)..(3): (S)-2-amino-4,4-dimethylpentanoic acid
  MOD_RES (4)..(4): 2-amino-2-(pent-4-en-1-yl)hept-6-enoic acid
  MOD_RES (6)..(6): (S)-2-amino-3-((carboxymethyl)(2,2,2-trifluoroethyl)amino) propanoic acid
  MOD_RES (7)..(7): 2-amino-2-methylpropanoic acid
  MOD_RES (11)..(11): (S)-3-amino-1-((pent-4-en-1-yloxy)carbonyl)pyrrolidine-3- carboxylic acid
  MOD_RES (12)..(12): (S)-2-amino-3-(2-chlorophenyl)propanoic acid
  MOD_RES (13)..(13): (S)-2-amino-3-(benzo[b]thiophen-3-yl)propanoic acid
  C-term amino
XDXXDXXGFTXFXQ

SEQ ID NO: 1319 - protein, 14 aa, Artificial Sequence
  Description of Artificial Sequence: Synthetic peptide
  N-term Acetic Acid
  MOD_RES (1)..(1): (R)-2-allylpyrrolidine-2-carboxylic acid
  MOD_RES (3)..(3): (S)-2-amino-4,4-dimethylpentanoic acid
  MOD_RES (4)..(4): 2-amino-2-(pent-4-en-1-yl)hept-6-enoic acid
  MOD_RES (6)..(6): (S)-2-amino-3-((carboxymethyl)(2,2,2-trifluoroethyl)amino) propanoic acid
  MOD_RES (11)..(11): (S)-3-amino-1-((hex-5-en-1-yloxy)carbonyl)pyrrolidine-3- carboxylic acid
  MOD_RES (12)..(12): (S)-2-amino-3-(thiophen-3-yl)propanoic acid
  MOD_RES (13)..(13): (S)-2-amino-3-(benzo[b]thiophen-3-yl)propanoic acid
  C-term amino
XDXXDXAAFLXXXQ

SEQ ID NO: 1320 - protein, 14 aa, Artificial Sequence
  Description of Artificial Sequence: Synthetic peptide
  N-term Acetic Acid
  MOD_RES (1)..(1): (R)-2-allylpyrrolidine-2-carboxylic acid
  MOD_RES (3)..(3): (S)-2-amino-4,4-dimethylpentanoic acid
  MOD_RES (4)..(4): 2-amino-2-(pent-4-en-1-yl)hept-6-enoic acid
  MOD_RES (6)..(6): (S)-2-amino-3-((carboxymethyl)(2,2,2-trifluoroethyl)amino) propanoic acid
  MOD_RES (11)..(11): (S)-2-amino-2-methyldec-9-enoic acid
  MOD_RES (12)..(12): (S)-2-amino-3-(thiophen-3-yl)propanoic acid
  MOD_RES (13)..(13): (S)-2-amino-3-(benzo[b]thiophen-3-yl)propanoic acid
  C-term amino
XDXXDXAAFLXXXQ

SEQ ID NO: 1321 - protein, 14 aa, Artificial Sequence
  Description of Artificial Sequence: Synthetic peptide
  N-term Acetic Acid
  MOD_RES (1)..(1): (R)-2-allylpyrrolidine-2-carboxylic acid
  MOD_RES (3)..(3): (S)-2-amino-4,4-dimethylpentanoic acid
  MOD_RES (4)..(4): 2-amino-2-(pent-4-en-1-yl)hept-6-enoic acid
  MOD_RES (6)..(6): (S)-2-amino-3-((carboxymethyl)(2,2,2-trifluoroethyl)amino) propanoic acid
  MOD_RES (11)..(11): (S)-3-amino-1-((pent-4-en-1-yloxy)carbonyl)pyrrolidine-3- carboxylic acid
  MOD_RES (13)..(13): (S)-2-amino-3-(benzo[b]thiophen-3-yl)propanoic acid
  C-term amino
XDXXDXAAFLXFXQ

SEQ ID NO: 1322 - protein, 14 aa, Artificial Sequence
  Description of Artificial Sequence: Synthetic peptide
  N-term Acetic Acid
  MOD_RES (1)..(1): (R)-2-allylpyrrolidine-2-carboxylic acid
  MOD_RES (3)..(3): (S)-2-amino-4,4-dimethylpentanoic acid
  MOD_RES (4)..(4): 2-amino-2-(pent-4-en-1-yl)hept-6-enoic acid
  MOD_RES (6)..(6): (S)-2-amino-3-((carboxymethyl)(2,2,2-trifluoroethyl)amino) propanoic acid
  MOD_RES (11)..(11): (S)-3-amino-1-((pent-4-en-1-yloxy)carbonyl)pyrrolidine-3- carboxylic acid
  MOD_RES (12)..(12): (S)-2-amino-3-(pyridin-3-yl)propanoic acid
  MOD_RES (13)..(13): (S)-2-amino-3-(benzo[b]thiophen-3-yl)propanoic acid
  C-term amino
XDXXDXAAFLXXXQ

SEQ ID NO: 1323 - protein, 14 aa, Artificial Sequence
  Description of Artificial Sequence: Synthetic peptide
  N-term Acetic Acid
  MOD_RES (1)..(1): (R)-2-allylpyrrolidine-2-carboxylic acid
  MOD_RES (3)..(3): (S)-2-amino-4,4-dimethylpentanoic acid
  MOD_RES (4)..(4): 2-amino-2-(pent-4-en-1-yl)hept-6-enoic acid
  MOD_RES (6)..(6): (S)-2-amino-3-((carboxymethyl)(2,2,2-trifluoroethyl)amino) propanoic acid
  MOD_RES (11)..(11): (S)-3-amino-1-((pent-4-en-1-yloxy)carbonyl)pyrrolidine-3- carboxylic acid
  MOD_RES (12)..(12): (S)-2-amino-3-(2-cyanophenyl)propanoic acid
  MOD_RES (13)..(13): (S)-2-amino-3-(benzo[b]thiophen-3-yl)propanoic acid
  C-term amino
XDXXDXAAFLXFXQ

SEQ ID NO: 1324 - protein, 14 aa, Artificial Sequence
  Description of Artificial Sequence: Synthetic peptide
  N-term Acetic Acid
  MOD_RES (1)..(1): (R)-2-allylpyrrolidine-2-carboxylic acid
  MOD_RES (3)..(3): (S)-2-amino-4,4-dimethylpentanoic acid
  MOD_RES (4)..(4): 2-amino-2-(pent-4-en-1-yl)hept-6-enoic acid
  MOD_RES (6)..(6): (S)-2-amino-3-((carboxymethyl)(2,2,2-trifluoroethyl)amino) propanoic acid
  MOD_RES (11)..(11): (S)-3-amino-1-((pent-4-en-1-yloxy)carbonyl)pyrrolidine-3- carboxylic acid
  MOD_RES (12)..(12): (S)-2-amino-3-cyclopentylpropanoic acid
  MOD_RES (13)..(13): (S)-2-amino-3-(benzo[b]thiophen-3-yl)propanoic acid
  C-term amino
XDXXDXAAFLXXXQ

SEQ ID NO: 1325 - protein, 14 aa, Artificial Sequence
  Description of Artificial Sequence: Synthetic peptide
  N-term Acetic Acid
  MOD_RES (1)..(1): (R)-2-allylpyrrolidine-2-carboxylic acid
  MOD_RES (3)..(3): (S)-2-amino-4,4-dimethylpentanoic acid
  MOD_RES (4)..(4): 2-amino-2-(pent-4-en-1-yl)hept-6-enoic acid
  MOD_RES (6)..(6): (S)-2-amino-3-((carboxymethyl)(2,2,2-trifluoroethyl)amino) propanoic acid
  MOD_RES (11)..(11): (S)-3-amino-1-((pent-4-en-1-yloxy)carbonyl)pyrrolidine-3- carboxylic acid
  MOD_RES (12)..(12): (S)-2-amino-3-(2-(trifluoromethyl)phenyl)propanoic acid
  MOD_RES (13)..(13): (S)-2-amino-3-(benzo[b]thiophen-3-yl)propanoic acid
  C-term amino
XDXXDXAAFLXFXQ

SEQ ID NO: 1326 - protein, 14 aa, Artificial Sequence
  Description of Artificial Sequence: Synthetic peptide
  N-term Acetic Acid
  MOD_RES (1)..(1): (R)-2-allylpyrrolidine-2-carboxylic acid
  MOD_RES (3)..(3): (S)-2-amino-4,4-dimethylpentanoic acid
  MOD_RES (4)..(4): 2-amino-2-(pent-4-en-1-yl)hept-6-enoic acid
  MOD_RES (6)..(6): (S)-2-amino-3-((carboxymethyl)(2,2,2-trifluoroethyl)amino) propanoic acid
  MOD_RES (11)..(11): (S)-3-amino-1-((pent-4-en-1-yloxy)carbonyl)pyrrolidine-3- carboxylic acid
  MOD_RES (12)..(12): (S)-2-amino-3-(thiophen-3-yl)propanoic acid
  MOD_RES (13)..(13): (S)-2-amino-3-(benzo[b]thiophen-3-yl)propanoic acid
  C-term amino
XDXXDXAAFLXXXN

SEQ ID NO: 1327 - protein, 14 aa, Artificial Sequence
  Description of Artificial Sequence: Synthetic peptide
  N-term Acetic Acid
  MOD_RES (1)..(1): (R)-2-allylpyrrolidine-2-carboxylic acid
  MOD_RES (3)..(3): (S)-2-amino-4,4-dimethylpentanoic acid
  MOD_RES (4)..(4): 2-amino-2-(pent-4-en-1-yl)hept-6-enoic acid
  MOD_RES (6)..(6): (S)-2-amino-3-((carboxymethyl)(2,2,2-trifluoroethyl)amino) propanoic acid
  MOD_RES (11)..(11): (S)-3-amino-1-((pent-4-en-1-yloxy)carbonyl)pyrrolidine-3- carboxylic acid
  MOD_RES (12)..(12): (S)-2-amino-3-(thiophen-3-yl)propanoic acid
  MOD_RES (13)..(13): (S)-2-amino-3-(benzo[b]thiophen-3-yl)propanoic acid
  C-term amino
XDXXDXAAFLXXXT

SEQ ID NO: 1328 - protein, 14 aa, Artificial Sequence
  Description of Artificial Sequence: Synthetic peptide
  N-term Acetic Acid
  MOD_RES (1)..(1): (R)-2-allylpyrrolidine-2-carboxylic acid
  MOD_RES (3)..(3): (S)-2-amino-4,4-dimethylpentanoic acid
  MOD_RES (4)..(4): 2-amino-2-(pent-4-en-1-yl)hept-6-enoic acid
  MOD_RES (6)..(6): (S)-2-amino-3-((carboxymethyl)(2,2,2-trifluoroethyl)amino) propanoic acid
  MOD_RES (11)..(11): (S)-3-amino-1-((pent-4-en-1-yloxy)carbonyl)pyrrolidine-3- carboxylic acid
  MOD_RES (12)..(12): (S)-2-amino-3-(thiophen-3-yl)propanoic acid
  MOD_RES (13)..(13): (S)-2-amino-3-(benzo[b]thiophen-3-yl)propanoic acid
  MOD_RES (14)..(14): (S)-2-amino-3-(2-carbamoylphenyl)propanoic acid
  C-term amino
XDXXDXAAFLXXXF

SEQ ID NO: 1329 - protein, 14 aa, Artificial Sequence
  Description of Artificial Sequence: Synthetic peptide
  N-term Acetic Acid
  MOD_RES (1)..(1): (R)-2-allylpyrrolidine-2-carboxylic acid
  MOD_RES (3)..(3): (S)-2-amino-4,4-dimethylpentanoic acid
  MOD_RES (4)..(4): 2-amino-2-(pent-4-en-1-yl)hept-6-enoic acid
  MOD_RES (6)..(6): (S)-2-amino-3-((carboxymethyl)(2,2,2-trifluoroethyl)amino) propanoic acid
  MOD_RES (11)..(11): (S)-3-amino-1-((pent-4-en-1-yloxy)carbonyl)pyrrolidine-3- carboxylic acid
  MOD_RES (12)..(12): (S)-2-amino-3-(thiophen-3-yl)propanoic acid
  MOD_RES (13)..(13): (S)-2-amino-3-(benzo[b]thiophen-3-yl)propanoic acid
  MOD_RES (14)..(14): (S)-2-amino-3-(3-carbamoylphenyl)propanoic acid
  C-term amino
XDXXDXAAFLXXXF

SEQ ID NO: 1330 - protein, 14 aa, Artificial Sequence
  Description of Artificial Sequence: Synthetic peptide
  N-term Acetic Acid
  MOD_RES (1)..(1): (R)-2-allylpyrrolidine-2-carboxylic acid
  MOD_RES (3)..(3): (S)-2-amino-4,4-dimethylpentanoic acid
  MOD_RES (4)..(4): 2-amino-2-(pent-4-en-1-yl)hept-6-enoic acid
  MOD_RES (6)..(6): (S)-2-amino-3-((carboxymethyl)(2,2,2-trifluoroethyl)amino) propanoic acid
  MOD_RES (11)..(11): (S)-3-amino-1-((pent-4-en-1-yloxy)carbonyl)pyrrolidine-3- carboxylic acid
  MOD_RES (12)..(12): (S)-2-amino-3-(thiophen-3-yl)propanoic acid
  MOD_RES (13)..(13): (S)-2-amino-3-(benzo[b]thiophen-3-yl)propanoic acid
  MOD_RES (14)..(14): N6-acetyl-L-lysine
  C-term amino
XDXXDXAAFLXXXK

SEQ ID NO: 1331 - protein, 14 aa, Artificial Sequence
  Description of Artificial Sequence: Synthetic peptide
  N-term Acetic Acid
  MOD_RES (1)..(1): (R)-2-allylpyrrolidine-2-carboxylic acid
  MOD_RES (3)..(3): (S)-2-amino-4,4-dimethylpentanoic acid
  MOD_RES (4)..(4): 2-amino-2-(pent-4-en-1-yl)hept-6-enoic acid
  MOD_RES (6)..(6): (S)-2-amino-3-((carboxymethyl)(2,2,2-trifluoroethyl)amino) propanoic acid
  MOD_RES (11)..(11): (S)-3-amino-1-((pent-4-en-1-yloxy)carbonyl)pyrrolidine-3- carboxylic acid
  MOD_RES (12)..(12): (S)-2-amino-3-(thiophen-3-yl)propanoic acid
  MOD_RES (13)..(13): (S)-2-amino-3-(benzo[b]thiophen-3-yl)propanoic acid
  C-term amino
XDXXDXAAFLXXXA

SEQ ID NO: 1332 - protein, 14 aa, Artificial Sequence
  Description of Artificial Sequence: Synthetic peptide
  N-term Acetic Acid
  MOD_RES (1)..(1): (R)-2-allylpyrrolidine-2-carboxylic acid
  MOD_RES (2)..(2): (S)-2-amino-4-mercapto-4-oxobutanoic acid
  MOD_RES (3)..(3): (S)-2-amino-4,4-dimethylpentanoic acid
  MOD_RES (4)..(4): 2-amino-2-(pent-4-en-1-yl)hept-6-enoic acid
  MOD_RES (11)..(11): (S)-3-amino-1-((pent-4-en-1-yloxy)carbonyl)pyrrolidine-3- carboxylic acid
  MOD_RES (12)..(12): (S)-2-amino-3-(2-chlorophenyl)propanoic acid
  MOD_RES (13)..(13): (S)-2-amino-3-(benzo[b]thiophen-3-yl)propanoic acid
  C-term amino
XXXXDDAAFNXFXQ

SEQ ID NO: 1333 - protein, 14 aa, Artificial Sequence
  Description of Artificial Sequence: Synthetic peptide
  N-term Acetic Acid
  MOD_RES (1)..(1): (R)-2-allylpyrrolidine-2-carboxylic acid
  MOD_RES (2)..(2): (S)-2-amino-4-oxo-4-(2-(pyridin-2-yldisulfaneyl)ethoxy) butanoic acid
  MOD_RES (3)..(3): (S)-2-amino-4,4-dimethylpentanoic acid
  MOD_RES (4)..(4): 2-amino-2-(pent-4-en-1-yl)hept-6-enoic acid
  MOD_RES (11)..(11): (S)-3-amino-1-((pent-4-en-1-yloxy)carbonyl)pyrrolidine-3- carboxylic acid
  MOD_RES (12)..(12): (S)-2-amino-3-(2-chlorophenyl)propanoic acid
  MOD_RES (13)..(13): (S)-2-amino-3-(benzo[b]thiophen-3-yl)propanoic acid
  C-term amino
XXXXDDAAFNXFXQ

SEQ ID NO: 1334 - protein, 14 aa, Artificial Sequence
  Description of Artificial Sequence: Synthetic peptide
  N-term Acetic Acid
  MOD_RES (1)..(1): (R)-2-allylpyrrolidine-2-carboxylic acid
  MOD_RES (3)..(3): (S)-2-amino-4,4-dimethylpentanoic acid
  MOD_RES (4)..(4): 2-amino-2-(pent-4-en-1-yl)hept-6-enoic acid
  MOD_RES (6)..(6): (S)-2-amino-3-((carboxymethyl)(2,2,2-trifluoroethyl)amino) propanoic acid
  MOD_RES (11)..(11): (S)-3-amino-1-((pent-4-en-1-yloxy)carbonyl)pyrrolidine-3- carboxylic acid
  MOD_RES (12)..(12): (S)-2-amino-3-(o-tolyl)propanoic acid
  MOD_RES (13)..(13): (S)-2-amino-3-(benzo[b]thiophen-3-yl)propanoic acid
  C-term amino
XDXXDXAAFLXXXQ

SEQ ID NO: 1335 - protein, 14 aa, Artificial Sequence
  Description of Artificial Sequence: Synthetic peptide
  N-term Acetic Acid
  MOD_RES (1)..(1): (R)-2-allylpyrrolidine-2-carboxylic acid
  MOD_RES (3)..(3): (S)-2-amino-4,4-dimethylpentanoic acid
  MOD_RES (4)..(4): 2-amino-2-(pent-4-en-1-yl)hept-6-enoic acid
  MOD_RES (9)..(9): (S)-2-amino-3-(2-aminophenyl)propanoic acid
  MOD_RES (11)..(11): (S)-3-amino-1-((pent-4-en-1-yloxy)carbonyl)pyrrolidine-3- carboxylic acid
  MOD_RES (12)..(12): (S)-2-amino-3-(2-chlorophenyl)propanoic acid
  MOD_RES (13)..(13): (S)-2-amino-3-(benzo[b]thiophen-3-yl)propanoic acid
  C-term amino
XDXXDDAAFNXFXQ

SEQ ID NO: 1336 - protein, 14 aa, Artificial Sequence
  Description of Artificial Sequence: Synthetic peptide
  N-term Acetic Acid
  MOD_RES (1)..(1): (R)-2-allylpyrrolidine-2-carboxylic acid
  MOD_RES (3)..(3): (S)-2-amino-4,4-dimethylpentanoic acid
  MOD_RES (4)..(4): 2-amino-2-(pent-4-en-1-yl)hept-6-enoic acid
  MOD_RES (9)..(9): (S)-2-amino-3-(2-aminophenyl)propanoic acid
  MOD_RES (11)..(11): (S)-3-amino-1-((pent-4-en-1-yloxy)carbonyl)pyrrolidine-3- carboxylic acid
  MOD_RES (12)..(12): (S)-2-amino-3-(thiophen-3-yl)propanoic acid
  MOD_RES (13)..(13): (S)-2-amino-3-(benzo[b]thiophen-3-yl)propanoic acid
  C-term amino
XDXXDDAAFNXXXQ

SEQ ID NO: 1337 - protein, 14 aa, Artificial Sequence
  Description of Artificial Sequence: Synthetic peptide
  N-term Acetic Acid
  MOD_RES (1)..(1): (R)-2-allylpyrrolidine-2-carboxylic acid
  MOD_RES (3)..(3): (S)-2-amino-4,4-dimethylpentanoic acid
  MOD_RES (4)..(4): 2-amino-2-(pent-4-en-1-yl)hept-6-enoic acid
  MOD_RES (6)..(6): (S)-2-amino-3-(N-(carboxymethyl)acetamido)propanoic acid
  MOD_RES (11)..(11): (S)-3-amino-1-((pent-4-en-1-yloxy)carbonyl)pyrrolidine-3- carboxylic acid
  MOD_RES (12)..(12): (S)-2-amino-3-(thiophen-3-yl)propanoic acid
  MOD_RES (13)..(13): (S)-2-amino-3-(benzo[b]thiophen-3-yl)propanoic acid
  C-term amino
XDXXDXAAFLXXXQ

SEQ ID NO: 1338 - protein, 14 aa, Artificial Sequence
  Description of Artificial Sequence: Synthetic peptide
  N-term Acetic Acid
  MOD_RES (1)..(1): (R)-2-allylpyrrolidine-2-carboxylic acid
  MOD_RES (3)..(3): (S)-2-amino-4,4-dimethylpentanoic acid
  MOD_RES (4)..(4): 2-amino-2-(pent-4-en-1-yl)hept-6-enoic acid
  MOD_RES (6)..(6): (S)-2-amino-3-(N-(carboxymethyl)-2,2,2-trifluoroacetamido) propanoic acid
  MOD_RES (11)..(11): (S)-3-amino-1-((pent-4-en-1-yloxy)carbonyl)pyrrolidine-3- carboxylic acid
  MOD_RES (12)..(12): (S)-2-amino-3-(thiophen-3-yl)propanoic acid
  MOD_RES (13)..(13): (S)-2-amino-3-(benzo[b]thiophen-3-yl)propanoic acid
  C-term amino
XDXXDXAAFLXXXQ

SEQ ID NO: 1339 - protein, 14 aa, Artificial Sequence
  Description of Artificial Sequence: Synthetic peptide
  N-term Acetic Acid
  MOD_RES (1)..(1): (R)-2-allylpyrrolidine-2-carboxylic acid
  MOD_RES (3)..(3): (S)-2-amino-4,4-dimethylpentanoic acid
  MOD_RES (4)..(4): 2-amino-2-(pent-4-en-1-yl)hept-6-enoic acid
  MOD_RES (6)..(6): (S)-2-amino-3-((carboxymethyl)amino)propanoic acid
  MOD_RES (11)..(11): (S)-3-amino-1-((pent-4-en-1-yloxy)carbonyl)pyrrolidine-3- carboxylic acid
  MOD_RES (12)..(12): (S)-2-amino-3-(thiophen-3-yl)propanoic acid
  MOD_RES (13)..(13): (S)-2-amino-3-(benzo[b]thiophen-3-yl)propanoic acid
  C-term amino
XDXXDXAAFLXXXQ

SEQ ID NO: 1340 - protein, 14 aa, Artificial Sequence
  Description of Artificial Sequence: Synthetic peptide
  N-term Acetic Acid
  MOD_RES (1)..(1): (R)-2-allylpyrrolidine-2-carboxylic acid
  MOD_RES (3)..(3): (S)-2-amino-4,4-dimethylpentanoic acid
  MOD_RES (4)..(4): 2-amino-2-(pent-4-en-1-yl)hept-6-enoic acid
  MOD_RES (6)..(6): (S)-2-amino-3-((carboxymethyl)amino)propanoic acid
  MOD_RES (11)..(11): (S)-3-amino-1-((pent-4-en-1-yloxy)carbonyl)pyrrolidine-3- carboxylic acid
  MOD_RES (12)..(12): (S)-2-amino-3-(thiophen-3-yl)propanoic acid
  MOD_RES (13)..(13): (S)-2-amino-3-(benzo[b]thiophen-3-yl)propanoic acid
  C-term amino
XDXXDXAAFNXXXQ

SEQ ID NO: 1341 - protein, 14 aa, Artificial Sequence
  Description of Artificial Sequence: Synthetic peptide
  N-term Acetic Acid
  MOD_RES (1)..(1): (R)-2-allylpyrrolidine-2-carboxylic acid
  MOD_RES (3)..(3): (S)-2-amino-4,4-dimethylpentanoic acid
  MOD_RES (4)..(4): 2-amino-2-(pent-4-en-1-yl)hept-6-enoic acid
  MOD_RES (6)..(6): (S)-2-amino-3-((carboxymethyl)(3,3,4,4,4-pentafluorobutyl)amino) propanoic acid
  MOD_RES (11)..(11): (S)-3-amino-1-((pent-4-en-1-yloxy)carbonyl)pyrrolidine-3- carboxylic acid
  MOD_RES (12)..(12): (S)-2-amino-3-(thiophen-3-yl)propanoic acid
  MOD_RES (13)..(13): (S)-2-amino-3-(benzo[b]thiophen-3-yl)propanoic acid
  C-term amino
XDXXDXAAFNXXXQ

SEQ ID NO: 1342 - protein, 14 aa, Artificial Sequence
  Description of Artificial Sequence: Synthetic peptide
  N-term Acetic Acid
  MOD_RES (1)..(1): (R)-2-allylpyrrolidine-2-carboxylic acid
  MOD_RES (3)..(3): (S)-2-amino-4,4-dimethylpentanoic acid
  MOD_RES (4)..(4): 2-amino-2-(pent-4-en-1-yl)hept-6-enoic acid
  MOD_RES (11)..(11): (S)-3-amino-1-((pent-4-en-1-yloxy)carbonyl)pyrrolidine-3- carboxylic acid
  MOD_RES (13)..(13): (S)-2-amino-3-(benzo[b]thiophen-3-yl)propanoic acid
  C-term amino
XDXXNTAAFNXFXQ

SEQ ID NO: 1343 - protein, 14 aa, Artificial Sequence
  Description of Artificial Sequence: Synthetic peptide
  N-term Acetic Acid
  MOD_RES (1)..(1): (R)-2-allylpyrrolidine-2-carboxylic acid
  MOD_RES (3)..(3): (S)-2-amino-4,4-dimethylpentanoic acid
  MOD_RES (4)..(4): 2-amino-2-(pent-4-en-1-yl)hept-6-enoic acid
  MOD_RES (11)..(11): (S)-3-amino-1-((pent-4-en-1-yloxy)carbonyl)pyrrolidine-3- carboxylic acid
  MOD_RES (12)..(12): (S)-2-amino-3-(thiophen-2-yl)propanoic acid
  MOD_RES (13)..(13): (S)-2-amino-3-(benzo[b]thiophen-3-yl)propanoic acid
  C-term amino
XDXXNTAAFNXXXQ

SEQ ID NO: 1344 - protein, 14 aa, Artificial Sequence
  Description of Artificial Sequence: Synthetic peptide
  N-term Acetic Acid
  MOD_RES (1)..(1): (R)-2-allylpyrrolidine-2-carboxylic acid
  MOD_RES (3)..(3): (S)-2-amino-4,4-dimethylpentanoic acid
  MOD_RES (4)..(4): 2-amino-2-(pent-4-en-1-yl)hept-6-enoic acid
  MOD_RES (11)..(11): (S)-3-amino-1-((pent-4-en-1-yloxy)carbonyl)pyrrolidine-3- carboxylic acid
  MOD_RES (12)..(12): (S)-2-amino-3-(o-tolyl)propanoic acid
  MOD_RES (13)..(13): (S)-2-amino-3-(benzo[b]thiophen-3-yl)propanoic acid
  C-term amino
XDXXNTAAFNXXXQ

SEQ ID NO: 1345 - protein, 14 aa, Artificial Sequence
  Description of Artificial Sequence: Synthetic peptide
  N-term Acetic Acid
  MOD_RES (1)..(1): (R)-2-allylpyrrolidine-2-carboxylic acid
  MOD_RES (3)..(3): (S)-2-amino-4,4-dimethylpentanoic acid
  MOD_RES (4)..(4): 2-amino-2-(pent-4-en-1-yl)hept-6-enoic acid
  MOD_RES (11)..(11): (S)-3-amino-1-((pent-4-en-1-yloxy)carbonyl)pyrrolidine-3- carboxylic acid
  MOD_RES (12)..(12): (S)-2-amino-3-(2-(trifluoromethyl)phenyl)propanoic acid
  MOD_RES (13)..(13): (S)-2-amino-3-(benzo[b]thiophen-3-yl)propanoic acid
  C-term amino
XDXXNTAAFNXFXQ

SEQ ID NO: 1346 - protein, 14 aa, Artificial Sequence
  Description of Artificial Sequence: Synthetic peptide
  N-term Acetic Acid
  MOD_RES (1)..(1): (R)-2-allylpyrrolidine-2-carboxylic acid
  MOD_RES (3)..(3): (S)-2-amino-4,4-dimethylpentanoic acid
  MOD_RES (4)..(4): 2-amino-2-(pent-4-en-1-yl)hept-6-enoic acid
  MOD_RES (11)..(11): (S)-3-amino-1-((pent-4-en-1-yloxy)carbonyl)pyrrolidine-3- carboxylic acid
  MOD_RES (12)..(12): (S)-2-amino-3-(m-tolyl)propanoic acid
  MOD_RES (13)..(13): (S)-2-amino-3-(benzo[b]thiophen-3-yl)propanoic acid
  C-term amino
XDXXNTAAFNXXXQ

SEQ ID NO: 1347 - protein, 14 aa, Artificial Sequence
  Description of Artificial Sequence: Synthetic peptide
  N-term Acetic Acid
  MOD_RES (1)..(1): (R)-2-allylpyrrolidine-2-carboxylic acid
  MOD_RES (3)..(3): (S)-2-amino-4,4-dimethylpentanoic acid
  MOD_RES (4)..(4): 2-amino-2-(pent-4-en-1-yl)hept-6-enoic acid
  MOD_RES (11)..(11): (S)-3-amino-1-((pent-4-en-1-yloxy)carbonyl)pyrrolidine-3- carboxylic acid
  MOD_RES (12)..(12): (S)-2-amino-3-(thiophen-3-yl)propanoic acid
  MOD_RES (13)..(13): (S)-2-amino-3-(benzo[b]thiophen-3-yl)propanoic acid
  C-term amino
XDXXNTAAFFXXXQ

SEQ ID NO: 1348 - protein, 14 aa, Artificial Sequence
  Description of Artificial Sequence: Synthetic peptide
  N-term Acetic Acid
  MOD_RES (1)..(1): (R)-2-allylpyrrolidine-2-carboxylic acid
  MOD_RES (3)..(3): (S)-2-amino-4,4-dimethylpentanoic acid
  MOD_RES (4)..(4): 2-amino-2-(pent-4-en-1-yl)hept-6-enoic acid
  MOD_RES (11)..(11): (S)-3-amino-1-((pent-4-en-1-yloxy)carbonyl)pyrrolidine-3- carboxylic acid
  MOD_RES (12)..(12): (S)-2-amino-3-(thiophen-3-yl)propanoic acid
  MOD_RES (13)..(13): (S)-2-amino-3-(benzo[b]thiophen-3-yl)propanoic acid
  C-term amino
XDXXNTAAFWXXXQ

SEQ ID NO: 1349 - protein, 13 aa, Artificial Sequence
  Description of Artificial Sequence: Synthetic peptide
  N-term Acetic Acid
  MOD_RES (1)..(1): (R)-2-allylpyrrolidine-2-carboxylic acid
  MOD_RES (3)..(3): (S)-2-amino-4,4-dimethylpentanoic acid
  MOD_RES (4)..(4): 2-amino-2-(pent-4-en-1-yl)hept-6-enoic acid
  MOD_RES (11)..(11): (S)-3-amino-1-((pent-4-en-1-yloxy)carbonyl)pyrrolidine-3- carboxylic acid
  MOD_RES (12)..(12): (S)-2-amino-3-(thiophen-3-yl)propanoic acid
  MOD_RES (13)..(13): (S)-2-amino-3-(benzo[b]thiophen-3-yl)propanoic acid
  C-term amino
XDXXNTAAFNXXX

SEQ ID NO: 1350 - protein, 14 aa, Artificial Sequence
  Description of Artificial Sequence: Synthetic peptide
  N-term Acetic Acid
  MOD_RES (1)..(1): (R)-2-allylpyrrolidine-2-carboxylic acid
  MOD_RES (3)..(3): (S)-2-amino-4,4-dimethylpentanoic acid
  MOD_RES (4)..(4): 2-amino-2-(pent-4-en-1-yl)hept-6-enoic acid
  MOD_RES (11)..(11): (S)-3-amino-1-((pent-4-en-1-yloxy)carbonyl)pyrrolidine-3- carboxylic acid
  MOD_RES (12)..(12): (S)-2-amino-3-(thiophen-3-yl)propanoic acid
  MOD_RES (13)..(13): (S)-2-amino-3-(benzo[b]thiophen-3-yl)propanoic acid
  C-term amino
XDXXNTAAFNXXXR

SEQ ID NO: 1351 - protein, 14 aa, Artificial Sequence
  Description of Artificial Sequence: Synthetic peptide
  N-term Acetic Acid
  MOD_RES (1)..(1): (R)-2-allylpyrrolidine-2-carboxylic acid
  MOD_RES (3)..(3): (S)-2-amino-4,4-dimethylpentanoic acid
  MOD_RES (4)..(4): 2-amino-2-(pent-4-en-1-yl)hept-6-enoic acid
  MOD_RES (11)..(11): (S)-3-amino-1-((pent-4-en-1-yloxy)carbonyl)pyrrolidine-3- carboxylic acid
  MOD_RES (12)..(12): (S)-2-amino-3-(thiophen-3-yl)propanoic acid
  MOD_RES (13)..(13): (S)-2-amino-3-(benzo[b]thiophen-3-yl)propanoic acid
  C-term amino
XDXXNTAAFNXXXF

SEQ ID NO: 1352 - protein, 14 aa, Artificial Sequence
  Description of Artificial Sequence: Synthetic peptide
  N-term Acetic Acid
  MOD_RES (1)..(1): (R)-2-allylpyrrolidine-2-carboxylic acid
  MOD_RES (3)..(3): (S)-2-amino-4,4-dimethylpentanoic acid
  MOD_RES (4)..(4): 2-amino-2-(pent-4-en-1-yl)hept-6-enoic acid
  MOD_RES (11)..(11): (S)-3-amino-1-((pent-4-en-1-yloxy)carbonyl)pyrrolidine-3- carboxylic acid
  MOD_RES (12)..(12): (S)-2-amino-3-(thiophen-3-yl)propanoic acid
  MOD_RES (13)..(13): (S)-2-amino-3-(benzo[b]thiophen-3-yl)propanoic acid
  C-term amino
XDXXNTAAFNXXXT

SEQ ID NO: 1353 - protein, 14 aa, Artificial Sequence
  Description of Artificial Sequence: Synthetic peptide
  N-term Acetic Acid
  MOD_RES (1)..(1): (R)-2-allylpyrrolidine-2-carboxylic acid
  MOD_RES (3)..(3): (S)-2-amino-4,4-dimethylpentanoic acid
  MOD_RES (4)..(4): 2-amino-2-(pent-4-en-1-yl)hept-6-enoic acid
  MOD_RES (11)..(11): (S)-3-amino-1-((pent-4-en-1-yloxy)carbonyl)pyrrolidine-3- carboxylic acid
  MOD_RES (12)..(12): (S)-2-amino-3-(thiophen-3-yl)propanoic acid
  MOD_RES (13)..(13): (S)-2-amino-3-(benzo[b]thiophen-3-yl)propanoic acid
  C-term amino
XDXXNTAAFNXXXN

SEQ ID NO: 1354 - protein, 14 aa, Artificial Sequence
  Description of Artificial Sequence: Synthetic peptide
  N-term Acetic Acid
  MOD_RES (1)..(1): (R)-2-allylpyrrolidine-2-carboxylic acid
  MOD_RES (3)..(3): (S)-2-amino-4,4-dimethylpentanoic acid
  MOD_RES (4)..(4): 2-amino-2-(pent-4-en-1-yl)hept-6-enoic acid
  MOD_RES (6)..(6): (S)-2-amino-3-((carboxymethyl)(2,2,2-trifluoroethyl)amino) propanoic acid
  MOD_RES (11)..(11): (S)-3-amino-1-((pent-4-en-1-yloxy)carbonyl)pyrrolidine-3- carboxylic acid
  MOD_RES (12)..(12): (S)-2-amino-3-(thiophen-3-yl)propanoic acid
  MOD_RES (13)..(13): (S)-2-amino-3-(benzo[b]thiophen-3-yl)propanoic acid
  C-term amino
XDXXDXAAFLXXXL

SEQ ID NO: 1355 - protein, 14 aa, Artificial Sequence
  Description of Artificial Sequence: Synthetic peptide
  N-term Acetic Acid
  MOD_RES (1)..(1): (R)-2-allylpyrrolidine-2-carboxylic acid
  MOD_RES (3)..(3): (S)-2-amino-4,4-dimethylpentanoic acid
  MOD_RES (4)..(4): 2-amino-2-(pent-4-en-1-yl)hept-6-enoic acid
  MOD_RES (6)..(6): (S)-2-amino-3-((carboxymethyl)(2,2,2-trifluoroethyl)amino) propanoic acid
  MOD_RES (11)..(11): (S)-3-amino-1-((pent-4-en-1-yloxy)carbonyl)pyrrolidine-3- carboxylic acid
  MOD_RES (12)..(12): (S)-2-amino-3-(thiophen-3-yl)propanoic acid
  MOD_RES (13)..(13): (S)-2-amino-3-(benzo[b]thiophen-3-yl)propanoic acid
  C-term amino
XDXXDXAAFLXXXF

SEQ ID NO: 1356 - protein, 14 aa, Artificial Sequence
  Description of Artificial Sequence: Synthetic peptide
  N-term Acetic Acid
  MOD_RES (1)..(1): (R)-2-allylpyrrolidine-2-carboxylic acid
  MOD_RES (3)..(3): (S)-2-amino-4,4-dimethylpentanoic acid
  MOD_RES (4)..(4): 2-amino-2-(pent-4-en-1-yl)hept-6-enoic acid
  MOD_RES (6)..(6): (S)-2-amino-3-((carboxymethyl)(2,2,2-trifluoroethyl)amino) propanoic acid
  MOD_RES (11)..(11): (S)-3-amino-1-((pent-4-en-1-yloxy)carbonyl)pyrrolidine-3- carboxylic acid
  MOD_RES (12)..(12): (S)-2-amino-3-(thiophen-3-yl)propanoic acid
  MOD_RES (13)..(13): (S)-2-amino-3-(benzo[b]thiophen-3-yl)propanoic acid
  C-term amino
XDXXDXAAFLXXXV

SEQ ID NO: 1357 - protein, 14 aa, Artificial Sequence
  Description of Artificial Sequence: Synthetic peptide
  N-term Acetic Acid
  MOD_RES (1)..(1): (R)-2-allylpyrrolidine-2-carboxylic acid
  MOD_RES (3)..(3): (S)-2-amino-4,4-dimethylpentanoic acid
  MOD_RES (4)..(4): 2-amino-2-(pent-4-en-1-yl)hept-6-enoic acid
  MOD_RES (6)..(6): (S)-2-amino-3-((carboxymethyl)(2,2,2-trifluoroethyl)amino) propanoic acid
  MOD_RES (11)..(11): (S)-3-amino-1-((pent-4-en-1-yloxy)carbonyl)pyrrolidine-3- carboxylic acid
  MOD_RES (12)..(12): (S)-2-amino-3-(thiophen-3-yl)propanoic acid
  MOD_RES (13)..(13): (S)-2-amino-3-(benzo[b]thiophen-3-yl)propanoic acid
  C-term amino
XDXXDXAAFTXXXL

SEQ ID NO: 1358 - protein, 14 aa, Artificial Sequence
  Description of Artificial Sequence: Synthetic peptide
  N-term Acetic Acid
  MOD_RES (1)..(1): (R)-2-allylpyrrolidine-2-carboxylic acid
  MOD_RES (3)..(3): (S)-2-amino-4,4-dimethylpentanoic acid
  MOD_RES (4)..(4): 2-amino-2-(pent-4-en-1-yl)hept-6-enoic acid
  MOD_RES (6)..(6): (S)-2-amino-3-((carboxymethyl)(2,2,2-trifluoroethyl)amino) propanoic acid
  MOD_RES (11)..(11): (S)-3-amino-1-((pent-4-en-1-yloxy)carbonyl)pyrrolidine-3- carboxylic acid
  MOD_RES (12)..(12): (S)-2-amino-3-(thiophen-3-yl)propanoic acid
  MOD_RES (13)..(13): (S)-2-amino-3-(benzo[b]thiophen-3-yl)propanoic acid
  C-term amino
XDXXDXAAFTXXXF

SEQ ID NO: 1359 - protein, 14 aa, Artificial Sequence
  Description of Artificial Sequence: Synthetic peptide
  N-term Acetic Acid
  MOD_RES (1)..(1): (R)-2-allylpyrrolidine-2-carboxylic acid
  MOD_RES (3)..(3): (S)-2-amino-4,4-dimethylpentanoic acid
  MOD_RES (4)..(4): 2-amino-2-(pent-4-en-1-yl)hept-6-enoic acid
  MOD_RES (6)..(6): (S)-2-amino-3-((carboxymethyl)(2,2,2-trifluoroethyl)amino) propanoic acid
  MOD_RES (11)..(11): (S)-3-amino-1-((pent-4-en-1-yloxy)carbonyl)pyrrolidine-3- carboxylic acid
  MOD_RES (12)..(12): (S)-2-amino-3-(thiophen-3-yl)propanoic acid
  MOD_RES (13)..(13): (S)-2-amino-3-(benzo[b]thiophen-3-yl)propanoic acid
  C-term amino
XDXXDXAAFTXXXV

SEQ ID NO: 1360 - protein, 14 aa, Artificial Sequence
  Description of Artificial Sequence: Synthetic peptide
  N-term Acetic Acid
  MOD_RES (1)..(1): (R)-2-allylpyrrolidine-2-carboxylic acid
  MOD_RES (3)..(3): (S)-2-amino-4,4-dimethylpentanoic acid
  MOD_RES (4)..(4): 2-amino-2-(pent-4-en-1-yl)hept-6-enoic acid
  MOD_RES (6)..(6): (S)-2-amino-3-((carboxymethyl)(2,2,2-trifluoroethyl)amino) propanoic acid
  MOD_RES (7)..(7): N6-isopropyl-L-lysine
  MOD_RES (11)..(11): (S)-3-amino-1-((pent-4-en-1-yloxy)carbonyl)pyrrolidine-3- carboxylic acid
  MOD_RES (12)..(12): (S)-2-amino-3-(thiophen-3-yl)propanoic acid
  MOD_RES (13)..(13): (S)-2-amino-3-(benzo[b]thiophen-3-yl)propanoic acid
  C-term amino
XDXXDXKAFLXXXL

SEQ ID NO: 1361 - protein, 14 aa, Artificial Sequence
  Description of Artificial Sequence: Synthetic peptide
  N-term Acetic Acid
  MOD_RES (1)..(1): (R)-2-allylpyrrolidine-2-carboxylic acid
  MOD_RES (3)..(3): (S)-2-amino-4,4-dimethylpentanoic acid
  MOD_RES (4)..(4): 2-amino-2-(pent-4-en-1-yl)hept-6-enoic acid
  MOD_RES (6)..(6): (S)-2-amino-3-((carboxymethyl)(2,2,2-trifluoroethyl)amino) propanoic acid
  MOD_RES (7)..(7): N6-isopropyl-L-lysine
  MOD_RES (11)..(11): (S)-3-amino-1-((pent-4-en-1-yloxy)carbonyl)pyrrolidine-3- carboxylic acid
  MOD_RES (12)..(12): (S)-2-amino-3-(thiophen-3-yl)propanoic acid
  MOD_RES (13)..(13): (S)-2-amino-3-(benzo[b]thiophen-3-yl)propanoic acid
  C-term amino
XDXXDXKAFTXXXL

SEQ ID NO: 1362 - protein, 14 aa, Artificial Sequence
  Description of Artificial Sequence: Synthetic peptide
  N-term Acetic Acid
  MOD_RES (1)..(1): (R)-2-allylpyrrolidine-2-carboxylic acid
  MOD_RES (3)..(3): (S)-2-amino-4,4-dimethylpentanoic acid
  MOD_RES (4)..(4): 2-amino-2-(pent-4-en-1-yl)hept-6-enoic acid
  MOD_RES (6)..(6): (S)-2-amino-3-((carboxymethyl)(2,2,2-trifluoroethyl)amino) propanoic acid
  MOD_RES (7)..(7): N6-isopropyl-L-lysine
  MOD_RES (11)..(11): (S)-3-amino-1-((pent-4-en-1-yloxy)carbonyl)pyrrolidine-3- carboxylic acid
  MOD_RES (12)..(12): (S)-2-amino-3-(thiophen-3-yl)propanoic acid
  MOD_RES (13)..(13): (S)-2-amino-3-(benzo[b]thiophen-3-yl)propanoic acid
  C-term amino
XDXXDXKAFLXXXF

SEQ ID NO: 1363 - protein, 14 aa, Artificial Sequence
  Description of Artificial Sequence: Synthetic peptide
  N-term Acetic Acid
  MOD_RES (1)..(1): (R)-2-allylpyrrolidine-2-carboxylic acid
  MOD_RES (3)..(3): (S)-2-amino-4,4-dimethylpentanoic acid
  MOD_RES (4)..(4): 2-amino-2-(pent-4-en-1-yl)hept-6-enoic acid
  MOD_RES (6)..(6): (S)-2-amino-3-((carboxymethyl)(2,2,2-trifluoroethyl)amino) propanoic acid
  MOD_RES (7)..(7): N6-isopropyl-L-lysine
  MOD_RES (11)..(11): (S)-3-amino-1-((pent-4-en-1-yloxy)carbonyl)pyrrolidine-3- carboxylic acid
  MOD_RES (12)..(12): (S)-2-amino-3-(thiophen-3-yl)propanoic acid
  MOD_RES (13)..(13): (S)-2-amino-3-(benzo[b]thiophen-3-yl)propanoic acid
  C-term amino
XDXXDXKAFTXXXF

SEQ ID NO: 1364 - protein, 14 aa, Artificial Sequence
  Description of Artificial Sequence: Synthetic peptide
  N-term Acetic Acid
  MOD_RES (1)..(1): (R)-2-allylpyrrolidine-2-carboxylic acid
  MOD_RES (3)..(3): (S)-2-amino-4,4-dimethylpentanoic acid
  MOD_RES (4)..(4): 2-amino-2-(pent-4-en-1-yl)hept-6-enoic acid
  MOD_RES (6)..(6): (S)-2-amino-3-((carboxymethyl)(2,2,2-trifluoroethyl)amino) propanoic acid
  MOD_RES (7)..(7): N6-isopropyl-L-lysine
  MOD_RES (11)..(11): (S)-3-amino-1-((pent-4-en-1-yloxy)carbonyl)pyrrolidine-3- carboxylic acid
  MOD_RES (12)..(12): (S)-2-amino-3-(thiophen-3-yl)propanoic acid
  MOD_RES (13)..(13): (S)-2-amino-3-(benzo[b]thiophen-3-yl)propanoic acid
  C-term amino
XDXXDXKAFLXXXV

SEQ ID NO: 1365 - protein, 14 aa, Artificial Sequence
  Description of Artificial Sequence: Synthetic peptide
  N-term Acetic Acid
  MOD_RES (1)..(1): (R)-2-allylpyrrolidine-2-carboxylic acid
  MOD_RES (3)..(3): (S)-2-amino-4,4-dimethylpentanoic acid
  MOD_RES (4)..(4): 2-amino-2-(pent-4-en-1-yl)hept-6-enoic acid
  MOD_RES (6)..(6): (S)-2-amino-3-((carboxymethyl)(2,2,2-trifluoroethyl)amino) propanoic acid
  MOD_RES (7)..(7): N6-isopropyl-L-lysine
  MOD_RES (11)..(11): (S)-3-amino-1-((pent-4-en-1-yloxy)carbonyl)pyrrolidine-3- carboxylic acid
  MOD_RES (12)..(12): (S)-2-amino-3-(thiophen-3-yl)propanoic acid
  MOD_RES (13)..(13): (S)-2-amino-3-(benzo[b]thiophen-3-yl)propanoic acid
  C-term amino
XDXXDXKAFTXXXV

SEQ ID NO: 1366 - protein, 14 aa, Artificial Sequence
  Description of Artificial Sequence: Synthetic peptide
  N-term Acetic Acid
  MOD_RES (1)..(1): (R)-2-allylpyrrolidine-2-carboxylic acid
  MOD_RES (3)..(3): (S)-2-amino-4,4-dimethylpentanoic acid
  MOD_RES (4)..(4): 2-amino-2-(pent-4-en-1-yl)hept-6-enoic acid
  MOD_RES (5)..(5): (S)-3-amino-2,2-dimethylsuccinic acid
  MOD_RES (6)..(6): (S)-2-amino-3-((carboxymethyl)(2,2,2-trifluoroethyl)amino) propanoic acid
  MOD_RES (11)..(11): (S)-3-amino-1-((pent-4-en-1-yloxy)carbonyl)pyrrolidine-3- carboxylic acid
  MOD_RES (12)..(12): (S)-2-amino-3-(thiophen-3-yl)propanoic acid
  MOD_RES (13)..(13): (S)-2-amino-3-(benzo[b]thiophen-3-yl)propanoic acid
  C-term amino
XDXXXXAAFLXXXQ

SEQ ID NO: 1367 - protein, 14 aa, Artificial Sequence
  Description of Artificial Sequence: Synthetic peptide
  N-term Acetic Acid
  MOD_RES (1)..(1): (R)-2-allylpyrrolidine-2-carboxylic acid
  MOD_RES (3)..(3): (S)-2-amino-5,5-dimethylhexanoic acid
  MOD_RES (4)..(4): 2-amino-2-(pent-4-en-1-yl)hept-6-enoic acid
  MOD_RES (6)..(6): (S)-2-amino-3-((carboxymethyl)(2,2,2-trifluoroethyl)amino) propanoic acid
  MOD_RES (11)..(11): (S)-3-amino-1-((pent-4-en-1-yloxy)carbonyl)pyrrolidine-3- carboxylic acid
  MOD_RES (12)..(12): (S)-2-amino-3-(thiophen-3-yl)propanoic acid
  MOD_RES (13)..(13): (S)-2-amino-3-(benzo[b]thiophen-3-yl)propanoic acid
  C-term amino
XDXXDXAAFLXXXQ

SEQ ID NO: 1368 - protein, 14 aa, Artificial Sequence
  Description of Artificial Sequence: Synthetic peptide
  N-term Acetic Acid
  MOD_RES (1)..(1): (R)-2-allylpyrrolidine-2-carboxylic acid
  MOD_RES (3)..(3): (S)-2-amino-4,4-dimethylpentanoic acid
  MOD_RES (4)..(4): 2-amino-2-(pent-4-en-1-yl)hept-6-enoic acid
  MOD_RES (6)..(6): (S)-2-amino-3-((carboxymethyl)(2,2,2-trifluoroethyl)amino) propanoic acid
  MOD_RES (10)..(10): (S)-2-amino-4,4-dimethylpentanoic acid
  MOD_RES (11)..(11): (S)-3-amino-1-((pent-4-en-1-yloxy)carbonyl)pyrrolidine-3- carboxylic acid
  MOD_RES (12)..(12): (S)-2-amino-3-(thiophen-3-yl)propanoic acid
  MOD_RES (13)..(13): (S)-2-amino-3-(benzo[b]thiophen-3-yl)propanoic acid
  C-term amino
XDXXDXAAFXXXXQ

SEQ ID NO: 1369 - protein, 14 aa, Artificial Sequence
  Description of Artificial Sequence: Synthetic peptide
  N-term Acetic Acid
  MOD_RES (1)..(1): (R)-2-allylpyrrolidine-2-carboxylic acid
  MOD_RES (3)..(3): (S)-2-amino-4,4-dimethylpentanoic acid
  MOD_RES (4)..(4): 2-amino-2-(pent-4-en-1-yl)hept-6-enoic acid
  MOD_RES (6)..(6): (S)-2-amino-3-((carboxymethyl)(2,2,2-trifluoroethyl)amino) propanoic acid
  MOD_RES (10)..(10): (S)-2-amino-3-cyclohexylpropanoic acid
  MOD_RES (11)..(11): (S)-3-amino-1-((pent-4-en-1-yloxy)carbonyl)pyrrolidine-3- carboxylic acid
  MOD_RES (12)..(12): (S)-2-amino-3-(thiophen-3-yl)propanoic acid
  MOD_RES (13)..(13): (S)-2-amino-3-(benzo[b]thiophen-3-yl)propanoic acid
  C-term amino
XDXXDXAAFXXXXQ

SEQ ID NO: 1370 - protein, 14 aa, Artificial Sequence
  Description of Artificial Sequence: Synthetic peptide
  N-term Acetic Acid
  MOD_RES (1)..(1): (R)-2-allylpyrrolidine-2-carboxylic acid
  MOD_RES (3)..(3): (S)-2-amino-3-cyclohexylpropanoic acid
  MOD_RES (4)..(4): 2-amino-2-(pent-4-en-1-yl)hept-6-enoic acid
  MOD_RES (6)..(6): (S)-2-amino-3-((carboxymethyl)(2,2,2-trifluoroethyl)amino) propanoic acid
  MOD_RES (11)..(11): (S)-3-amino-1-((pent-4-en-1-yloxy)carbonyl)pyrrolidine-3- carboxylic acid
  MOD_RES (12)..(12): (S)-2-amino-3-(thiophen-3-yl)propanoic acid
  MOD_RES (13)..(13): (S)-2-amino-3-(benzo[b]thiophen-3-yl)propanoic acid
  C-term amino
XDXXDXAAFLXXXQ

SEQ ID NO: 1371 - protein, 14 aa, Artificial Sequence
  Description of Artificial Sequence: Synthetic peptide
  N-term Acetic Acid
  MOD_RES (1)..(1): (R)-2-allylpyrrolidine-2-carboxylic acid
  MOD_RES (3)..(3): (S)-2-amino-4,4-dimethylpentanoic acid
  MOD_RES (4)..(4): 2-amino-2-(pent-4-en-1-yl)hept-6-enoic acid
  MOD_RES (6)..(6): (S)-2-amino-3-((carboxymethyl)(2,2,2-trifluoroethyl)amino) propanoic acid
  MOD_RES (10)..(10): (S)-2-aminohexanoic acid
  MOD_RES (11)..(11): (S)-3-amino-1-((pent-4-en-1-yloxy)carbonyl)pyrrolidine-3- carboxylic acid
  MOD_RES (12)..(12): (S)-2-amino-3-(thiophen-3-yl)propanoic acid
  MOD_RES (13)..(13): (S)-2-amino-3-(benzo[b]thiophen-3-yl)propanoic acid
  C-term amino
XDXXDXAAFXXXXQ

SEQ ID NO: 1372 - protein, 14 aa, Artificial Sequence
  Description of Artificial Sequence: Synthetic peptide
  N-term Acetic Acid
  MOD_RES (1)..(1): (R)-2-allylpyrrolidine-2-carboxylic acid
  MOD_RES (3)..(3): (S)-2-aminohexanoic acid
  MOD_RES (4)..(4): 2-amino-2-(pent-4-en-1-yl)hept-6-enoic acid
  MOD_RES (6)..(6): (S)-2-amino-3-((carboxymethyl)(2,2,2-trifluoroethyl)amino) propanoic acid
  MOD_RES (11)..(11): (S)-3-amino-1-((pent-4-en-1-yloxy)carbonyl)pyrrolidine-3- carboxylic acid
  MOD_RES (12)..(12): (S)-2-amino-3-(thiophen-3-yl)propanoic acid
  MOD_RES (13)..(13): (S)-2-amino-3-(benzo[b]thiophen-3-yl)propanoic acid
  C-term amino
XDXXDXAAFLXXXQ

SEQ ID NO: 1373 - protein, 15 aa, Artificial Sequence
  Description of Artificial Sequence: Synthetic peptide
  N-term Acetic Acid
  MOD_RES (1)..(1): (R)-2-allylpyrrolidine-2-carboxylic acid
  MOD_RES (3)..(3): (S)-2-amino-4,4-dimethylpentanoic acid
  MOD_RES (4)..(4): (S)-2-amino-2-methylhept-6-enoic acid
  MOD_RES (10)..(10): (R)-2-amino-2-methylhept-6-enoic acid
  MOD_RES (12)..(12): (S)-2-amino-3-(thiophen-3-yl)propanoic acid
  MOD_RES (13)..(13): (S)-2-amino-3-(benzo[b]thiophen-3-yl)propanoic acid
  MOD_RES (14)..(14): (S)-2-amino-2-methylhept-6-enoic acid
  C-term amino
XDXXDDAAFXAXXXA

SEQ ID NO: 1374 - protein, 15 aa, Artificial Sequence
  Description of Artificial Sequence: Synthetic peptide
  N-term Acetic Acid
  MOD_RES (1)..(1): (R)-2-allylpyrrolidine-2-carboxylic acid
  MOD_RES (3)..(3): (S)-2-amino-4,4-dimethylpentanoic acid
  MOD_RES (4)..(4): (S)-2-amino-2-methylhept-6-enoic acid
  MOD_RES (7)..(7): 2-amino-2-methylpropanoic acid
  MOD_RES (10)..(10): (R)-2-amino-2-methylhept-6-enoic acid
  MOD_RES (12)..(12): (S)-2-amino-3-(thiophen-3-yl)propanoic acid
  MOD_RES (13)..(13): (S)-2-amino-3-(benzo[b]thiophen-3-yl)propanoic acid
  MOD_RES (14)..(14): (S)-2-amino-2-methylhept-6-enoic acid
  C-term amino
XDXXDDXAFXAXXXA

SEQ ID NO: 1375 - protein, 15 aa, Artificial Sequence
  Description of Artificial Sequence: Synthetic peptide
  N-term Acetic Acid
  MOD_RES (1)..(1): (R)-2-allylpyrrolidine-2-carboxylic acid
  MOD_RES (3)..(3): (S)-2-amino-4,4-dimethylpentanoic acid
  MOD_RES (4)..(4): (S)-2-amino-2-methylhept-6-enoic acid
  MOD_RES (7)..(7): (R)-2-amino-2-methylhept-6-enoic acid
  MOD_RES (12)..(12): (S)-2-amino-3-(thiophen-3-yl)propanoic acid
  MOD_RES (13)..(13): (S)-2-amino-3-(benzo[b]thiophen-3-yl)propanoic acid
  MOD_RES (14)..(14): (S)-3-amino-1-((pent-4-en-1-yloxy)carbonyl)pyrrolidine-3- carboxylic acid
  C-term amino
XDXXDDXAFLAXXXA

SEQ ID NO: 1376 - protein, 14 aa, Artificial Sequence
  Description of Artificial Sequence: Synthetic peptide
  N-term Acetic Acid
  MOD_RES (1)..(1): (R)-2-allylpyrrolidine-2-carboxylic acid
  MOD_RES (3)..(3): (S)-2-amino-4,4-dimethylpentanoic acid
  MOD_RES (4)..(4): 2-amino-2-(pent-4-en-1-yl)hept-6-enoic acid
  MOD_RES (10)..(10): L-homoserine
  MOD_RES (11)..(11): (S)-3-amino-1-((pent-4-en-1-yloxy)carbonyl)pyrrolidine-3- carboxylic acid
  MOD_RES (12)..(12): (S)-2-amino-3-(thiophen-3-yl)propanoic acid
  MOD_RES (13)..(13): (S)-2-amino-3-(benzo[b]thiophen-3-yl)propanoic acid
  C-term amino
XDXXDYAAFSXXXQ

SEQ ID NO: 1377 - protein, 14 aa, Artificial Sequence
  Description of Artificial Sequence: Synthetic peptide
  N-term Acetic Acid
  MOD_RES (1)..(1): (R)-2-allylpyrrolidine-2-carboxylic acid
  MOD_RES (3)..(3): (S)-2-amino-4,4-dimethylpentanoic acid
  MOD_RES (4)..(4): 2-amino-2-(pent-4-en-1-yl)hept-6-enoic acid
  MOD_RES (11)..(11): (S)-3-amino-1-((pent-4-en-1-yloxy)carbonyl)pyrrolidine-3- carboxylic acid
  MOD_RES (12)..(12): (S)-2-amino-3-(thiophen-3-yl)propanoic acid
  MOD_RES (13)..(13): (S)-2-amino-3-(benzo[b]thiophen-3-yl)propanoic acid
  C-term amino
XDXXDYAAFLXXXQ

SEQ ID NO: 1378 - protein, 14 aa, Artificial Sequence
  Description of Artificial Sequence: Synthetic peptide
  N-term Acetic Acid
  MOD_RES (1)..(1): (R)-2-allylpyrrolidine-2-carboxylic acid
  MOD_RES (3)..(3): (S)-2-amino-4,4-dimethylpentanoic acid
  MOD_RES (4)..(4): 2-amino-2-(pent-4-en-1-yl)hept-6-enoic acid
  MOD_RES (6)..(6): (S)-2-amino-4-(4-hydroxyphenyl)butanoic acid
  MOD_RES (11)..(11): (S)-3-amino-1-((pent-4-en-1-yloxy)carbonyl)pyrrolidine-3- carboxylic acid
  MOD_RES (12)..(12): (S)-2-amino-3-(thiophen-3-yl)propanoic acid
  MOD_RES (13)..(13): (S)-2-amino-3-(benzo[b]thiophen-3-yl)propanoic acid
  C-term amino
XDXXDXAAFNXXXQ

SEQ ID NO: 1379 - protein, 14 aa, Artificial Sequence
  Description of Artificial Sequence: Synthetic peptide
  N-term Acetic Acid
  MOD_RES (1)..(1): (R)-2-allylpyrrolidine-2-carboxylic acid
  MOD_RES (3)..(3): (S)-2-amino-4,4-dimethylpentanoic acid
  MOD_RES (4)..(4): 2-amino-2-(pent-4-en-1-yl)hept-6-enoic acid
  MOD_RES (6)..(6): (S)-2-amino-4-(4-hydroxyphenyl)butanoic acid
  MOD_RES (10)..(10): L-homoserine
  MOD_RES (11)..(11): (S)-3-amino-1-((pent-4-en-1-yloxy)carbonyl)pyrrolidine-3- carboxylic acid
  MOD_RES (12)..(12): (S)-2-amino-3-(thiophen-3-yl)propanoic acid
  MOD_RES (13)..(13): (S)-2-amino-3-(benzo[b]thiophen-3-yl)propanoic acid
  C-term amino
XDXXDXAAFSXXXQ

SEQ ID NO: 1380 - protein, 14 aa, Artificial Sequence
  Description of Artificial Sequence: Synthetic peptide
  N-term Acetic Acid
  MOD_RES (1)..(1): (R)-2-allylpyrrolidine-2-carboxylic acid
  MOD_RES (3)..(3): (S)-2-amino-4,4-dimethylpentanoic acid
  MOD_RES (4)..(4): 2-amino-2-(pent-4-en-1-yl)hept-6-enoic acid
  MOD_RES (6)..(6): (S)-2-amino-4-(4-hydroxyphenyl)butanoic acid
  MOD_RES (11)..(11): (S)-3-amino-1-((pent-4-en-1-yloxy)carbonyl)pyrrolidine-3- carboxylic acid
  MOD_RES (12)..(12): (S)-2-amino-3-(thiophen-3-yl)propanoic acid
  MOD_RES (13)..(13): (S)-2-amino-3-(benzo[b]thiophen-3-yl)propanoic acid
  C-term amino
XDXXDXAAFLXXXQ

SEQ ID NO: 1381 - protein, 14 aa, Artificial Sequence
  Description of Artificial Sequence: Synthetic peptide
  N-term Acetic Acid
  MOD_RES (1)..(1): (R)-2-allylpyrrolidine-2-carboxylic acid
  MOD_RES (3)..(3): (S)-2-amino-4,4-dimethylpentanoic acid
  MOD_RES (4)..(4): 2-amino-2-(pent-4-en-1-yl)hept-6-enoic acid
  MOD_RES (11)..(11): (S)-3-amino-1-((pent-4-en-1-yloxy)carbonyl)pyrrolidine-3- carboxylic acid
  MOD_RES (12)..(12): (S)-2-amino-3-(thiophen-3-yl)propanoic acid
  MOD_RES (13)..(13): (S)-2-amino-3-(benzo[b]thiophen-3-yl)propanoic acid
  C-term amino
XDXXDWAAFNXXXQ

SEQ ID NO: 1382 - protein, 14 aa, Artificial Sequence
  Description of Artificial Sequence: Synthetic peptide
  N-term Acetic Acid
  MOD_RES (1)..(1): (R)-2-allylpyrrolidine-2-carboxylic acid
  MOD_RES (3)..(3): (S)-2-amino-4,4-dimethylpentanoic acid
  MOD_RES (4)..(4): 2-amino-2-(pent-4-en-1-yl)hept-6-enoic acid
  MOD_RES (10)..(10): L-homoserine
  MOD_RES (11)..(11): (S)-3-amino-1-((pent-4-en-1-yloxy)carbonyl)pyrrolidine-3- carboxylic acid
  MOD_RES (12)..(12): (S)-2-amino-3-(thiophen-3-yl)propanoic acid
  MOD_RES (13)..(13): (S)-2-amino-3-(benzo[b]thiophen-3-yl)propanoic acid
  C-term amino
XDXXDWAAFSXXXQ

SEQ ID NO: 1383 - protein, 14 aa, Artificial Sequence
  Description of Artificial Sequence: Synthetic peptide
  N-term Acetic Acid
  MOD_RES (1)..(1): (R)-2-allylpyrrolidine-2-carboxylic acid
  MOD_RES (3)..(3): (S)-2-amino-4,4-dimethylpentanoic acid
  MOD_RES (4)..(4): 2-amino-2-(pent-4-en-1-yl)hept-6-enoic acid
  MOD_RES (6)..(6): (S)-2-amino-3-(perfluorophenyl)propanoic acid
  MOD_RES (11)..(11): (S)-3-amino-1-((pent-4-en-1-yloxy)carbonyl)pyrrolidine-3- carboxylic acid
  MOD_RES (12)..(12): (S)-2-amino-3-(thiophen-3-yl)propanoic acid
  MOD_RES (13)..(13): (S)-2-amino-3-(benzo[b]thiophen-3-yl)propanoic acid
  C-term amino
XDXXDFAAFNXXXQ

SEQ ID NO: 1384 - protein, 14 aa, Artificial Sequence
  Description of Artificial Sequence: Synthetic peptide
  N-term Acetic Acid
  MOD_RES (1)..(1): (R)-2-allylpyrrolidine-2-carboxylic acid
  MOD_RES (3)..(3): (S)-2-amino-4,4-dimethylpentanoic acid
  MOD_RES (4)..(4): 2-amino-2-(pent-4-en-1-yl)hept-6-enoic acid
  MOD_RES (6)..(6): (S)-2-amino-3-(perfluorophenyl)propanoic acid
  MOD_RES (10)..(10): L-homoserine
  MOD_RES (11)..(11): (S)-3-amino-1-((pent-4-en-1-yloxy)carbonyl)pyrrolidine-3- carboxylic acid
  MOD_RES (12)..(12): (S)-2-amino-3-(thiophen-3-yl)propanoic acid
  MOD_RES (13)..(13): (S)-2-amino-3-(benzo[b]thiophen-3-yl)propanoic acid
  C-term amino
XDXXDFAAFSXXXQ

SEQ ID NO: 1385 - protein, 14 aa, Artificial Sequence
  Description of Artificial Sequence: Synthetic peptide
  N-term Acetic Acid
  MOD_RES (1)..(1): (R)-2-allylpyrrolidine-2-carboxylic acid
  MOD_RES (3)..(3): (S)-2-amino-4,4-dimethylpentanoic acid
  MOD_RES (4)..(4): 2-amino-2-(pent-4-en-1-yl)hept-6-enoic acid
  MOD_RES (6)..(6): (S)-2-amino-3-(perfluorophenyl)propanoic acid
  MOD_RES (11)..(11): (S)-3-amino-1-((pent-4-en-1-yloxy)carbonyl)pyrrolidine-3- carboxylic acid
  MOD_RES (12)..(12): (S)-2-amino-3-(thiophen-3-yl)propanoic acid
  MOD_RES (13)..(13): (S)-2-amino-3-(benzo[b]thiophen-3-yl)propanoic acid
  C-term amino
XDXXDFAAFLXXXQ

SEQ ID NO: 1386 - protein, 14 aa, Artificial Sequence
  Description of Artificial Sequence: Synthetic peptide
  N-term Acetic Acid
  MOD_RES (1)..(1): (R)-2-allylpyrrolidine-2-carboxylic acid
  MOD_RES (3)..(3): (S)-2-amino-4,4-dimethylpentanoic acid
  MOD_RES (4)..(4): 2-amino-2-(pent-4-en-1-yl)hept-6-enoic acid
  MOD_RES (10)..(10): L-homoserine
  MOD_RES (11)..(11): (S)-3-amino-1-((pent-4-en-1-yloxy)carbonyl)pyrrolidine-3- carboxylic acid
  MOD_RES (12)..(12): (S)-2-amino-3-(thiophen-3-yl)propanoic acid
  MOD_RES (13)..(13): (S)-2-amino-3-(benzo[b]thiophen-3-yl)propanoic acid
  C-term amino
XDXXDHAAFSXXXQ

SEQ ID NO: 1387 - protein, 14 aa, Artificial Sequence
  Description of Artificial Sequence: Synthetic peptide
  N-term Acetic Acid
  MOD_RES (1)..(1): (R)-2-allylpyrrolidine-2-carboxylic acid
  MOD_RES (3)..(3): (S)-2-amino-4,4-dimethylpentanoic acid
  MOD_RES (4)..(4): 2-amino-2-(pent-4-en-1-yl)hept-6-enoic acid
  MOD_RES (11)..(11): (S)-3-amino-1-((pent-4-en-1-yloxy)carbonyl)pyrrolidine-3- carboxylic acid
  MOD_RES (12)..(12): (S)-2-amino-3-(thiophen-3-yl)propanoic acid
  MOD_RES (13)..(13): (S)-2-amino-3-(benzo[b]thiophen-3-yl)propanoic acid
  C-term amino
XDXXDHAAFLXXXQ

SEQ ID NO: 1388 - protein, 14 aa, Artificial Sequence
  Description of Artificial Sequence: Synthetic peptide
  N-term Acetic Acid
  MOD_RES (1)..(1): (R)-2-allylpyrrolidine-2-carboxylic acid
  MOD_RES (3)..(3): (S)-2-amino-4,4-dimethylpentanoic acid
  MOD_RES (4)..(4): 2-amino-2-(pent-4-en-1-yl)hept-6-enoic acid
  MOD_RES (6)..(6): (S)-2-amino-3-((carboxymethyl)(2,2,2-trifluoroethyl)amino) propanoic acid
  MOD_RES (11)..(11): (S)-3-amino-1-((pent-4-en-1-yloxy)carbonyl)pyrrolidine-3- carboxylic acid
  MOD_RES (12)..(12): (S)-2-amino-3-(thiophen-3-yl)propanoic acid
  MOD_RES (13)..(13): (S)-2-amino-3-(benzo[b]thiophen-3-yl)propanoic acid
  MOD_RES (14)..(14): (S)-5-([1,4'-bipiperidin]-1'-yl)-2-amino-5-oxopentanoic acid
  C-term amino
XDXXDXAAFLXXXX

SEQ ID NO: 1389 - protein, 14 aa, Artificial Sequence
  Description of Artificial Sequence: Synthetic peptide
  N-term Acetic Acid
  MOD_RES (1)..(1): (R)-2-allylpyrrolidine-2-carboxylic acid
  MOD_RES (3)..(3): (S)-2-amino-4,4-dimethylpentanoic acid
  MOD_RES (4)..(4): 2-amino-2-(pent-4-en-1-yl)hept-6-enoic acid
  MOD_RES (6)..(6): (S)-2-amino-3-((carboxymethyl)(2,2,2-trifluoroethyl)amino) propanoic acid
  MOD_RES (11)..(11): (S)-3-amino-1-((pent-4-en-1-yloxy)carbonyl)pyrrolidine-3- carboxylic acid
  MOD_RES (12)..(12): (S)-2-amino-3-(thiophen-3-yl)propanoic acid
  MOD_RES (13)..(13): (S)-2-amino-3-(benzo[b]thiophen-3-yl)propanoic acid
  MOD_RES (14)..(14): (S)-2-amino-5-(4-(3-(dimethylamino)propyl)piperazin-1-yl)-5- oxopentanoic acid
  C-term amino
XDXXDXAAFLXXXX

SEQ ID NO: 1390 - protein, 14 aa, Artificial Sequence
  Description of Artificial Sequence: Synthetic peptide
  N-term Acetic Acid
  MOD_RES (1)..(1): (R)-2-allylpyrrolidine-2-carboxylic acid
  MOD_RES (3)..(3): (S)-2-amino-4,4-dimethylpentanoic acid
  MOD_RES (4)..(4): 2-amino-2-(pent-4-en-1-yl)hept-6-enoic acid
  MOD_RES (6)..(6): (S)-2-amino-3-((carboxymethyl)(2,2,2-trifluoroethyl)amino) propanoic acid
  MOD_RES (11)..(11): (S)-3-amino-1-((pent-4-en-1-yloxy)carbonyl)pyrrolidine-3- carboxylic acid
  MOD_RES (12)..(12): (S)-2-amino-3-(thiophen-3-yl)propanoic acid
  MOD_RES (13)..(13): (S)-2-amino-3-(benzo[b]thiophen-3-yl)propanoic acid
  MOD_RES (14)..(14): (S)-2-amino-5-(4-(4-methylpiperazin-1-yl)piperidin-1-yl)-5- oxopentanoic acid
  C-term amino
XDXXDXAAFLXXXX

SEQ ID NO: 1391 - protein, 14 aa, Artificial Sequence
  Description of Artificial Sequence: Synthetic peptide
  N-term Acetic Acid
  MOD_RES (1)..(1): (R)-2-allylpyrrolidine-2-carboxylic acid
  MOD_RES (3)..(3): (S)-2-amino-4,4-dimethylpentanoic acid
  MOD_RES (4)..(4): 2-amino-2-(pent-4-en-1-yl)hept-6-enoic acid
  MOD_RES (6)..(6): (S)-2-amino-3-((carboxymethyl)(2,2,2-trifluoroethyl)amino) propanoic acid
  MOD_RES (11)..(11): (S)-3-amino-1-((pent-4-en-1-yloxy)carbonyl)pyrrolidine-3- carboxylic acid
  MOD_RES (12)..(12): (S)-2-amino-3-(thiophen-3-yl)propanoic acid
  MOD_RES (13)..(13): (S)-2-amino-3-(benzo[b]thiophen-3-yl)propanoic acid
  MOD_RES (14)..(14): (S)-2-amino-5-oxo-5-(4-(2,2,2-trifluoroethyl)piperazin-1-yl) pentanoic acid
  C-term amino
XDXXDXAAFLXXXX

SEQ ID NO: 1392 - protein, 14 aa, Artificial Sequence
  Description of Artificial Sequence: Synthetic peptide
  N-term Acetic Acid
  MOD_RES (1)..(1): (R)-2-allylpyrrolidine-2-carboxylic acid
  MOD_RES (3)..(3): (S)-2-amino-4,4-dimethylpentanoic acid
  MOD_RES (4)..(4): 2-amino-2-(pent-4-en-1-yl)hept-6-enoic acid
  MOD_RES (6)..(6): (S)-2-amino-3-((carboxymethyl)(2,2,2-trifluoroethyl)amino) propanoic acid
  MOD_RES (11)..(11): (S)-3-amino-1-((pent-4-en-1-yloxy)carbonyl)pyrrolidine-3- carboxylic acid
  MOD_RES (12)..(12): (S)-2-amino-3-(thiophen-3-yl)propanoic acid
  MOD_RES (13)..(13): (S)-2-amino-3-(benzo[b]thiophen-3-yl)propanoic acid
  MOD_RES (14)..(14): (S)-2-amino-5-((R)-3-(dimethylamino)pyrrolidin-1-yl)-5- oxopentanoic acid
  C-term amino
XDXXDXAAFLXXXX

SEQ ID NO: 1393 - protein, 14 aa, Artificial Sequence
  Description of Artificial Sequence: Synthetic peptide
  N-term Acetic Acid
  MOD_RES (1)..(1): (R)-2-allylpyrrolidine-2-carboxylic acid
  MOD_RES (3)..(3): (S)-2-amino-4,4-dimethylpentanoic acid
  MOD_RES (4)..(4): (S)-2-amino-2-methylhept-6-enoic acid
  MOD_RES (11)..(11): 2-amino-2-methylpropanoic acid
  MOD_RES (12)..(12): (S)-2-amino-3-(thiophen-3-yl)propanoic acid
  MOD_RES (13)..(13): (S)-2-amino-3-(benzo[b]thiophen-3-yl)propanoic acid
  C-term amino
XDXXDDAAFLXXXQ

SEQ ID NO: 1394 - protein, 14 aa, Artificial Sequence
  Description of Artificial Sequence: Synthetic peptide
  N-term Acetic Acid
  MOD_RES (1)..(1): (R)-2-allylpyrrolidine-2-carboxylic acid
  MOD_RES (4)..(4): 2-amino-2-(pent-4-en-1-yl)hept-6-enoic acid
  MOD_RES (11)..(11): (S)-3-amino-1-((pent-4-en-1-yloxy)carbonyl)pyrrolidine-3- carboxylic acid
  C-term amino
XDLXDDAAFLXFWQ

SEQ ID NO: 1395 - protein, 14 aa, Artificial Sequence
  Description of Artificial Sequence: Synthetic peptide
  N-term Acetic Acid
  MOD_RES (1)..(1): (R)-2-allylpyrrolidine-2-carboxylic acid
  MOD_RES (3)..(3): (S)-2-amino-4,4-dimethylpentanoic acid
  MOD_RES (4)..(4): 2-amino-2-(pent-4-en-1-yl)hept-6-enoic acid
  MOD_RES (11)..(11): (S)-3-amino-1-((but-3-en-1-yloxy)carbonyl)pyrrolidine-3- carboxylic acid
  MOD_RES (12)..(12): (S)-2-amino-3-(thiophen-3-yl)propanoic acid
  MOD_RES (13)..(13): (S)-2-amino-3-(benzo[b]thiophen-3-yl)propanoic acid
  C-term amino
XDXXDDAAFNXXXQ

SEQ ID NO: 1396 - protein, 14 aa, Artificial Sequence
  Description of Artificial Sequence: Synthetic peptide
  N-term Acetic Acid
  MOD_RES (1)..(1): (R)-2-allylpyrrolidine-2-carboxylic acid
  MOD_RES (3)..(3): (S)-2-amino-4,4-dimethylpentanoic acid
  MOD_RES (4)..(4): 2-amino-2-(pent-4-en-1-yl)hept-6-enoic acid
  MOD_RES (11)..(11): (S)-3-amino-1-((but-3-en-1-yloxy)carbonyl)pyrrolidine-3- carboxylic acid
  MOD_RES (12)..(12): (S)-2-amino-3-(thiophen-3-yl)propanoic acid
  MOD_RES (13)..(13): (S)-2-amino-3-(benzo[b]thiophen-3-yl)propanoic acid
  C-term amino
XDXXDDAAFLXXXQ

SEQ ID NO: 1397 - protein, 14 aa, Artificial Sequence
  Description of Artificial Sequence: Synthetic peptide
  N-term Acetic Acid
  MOD_RES (1)..(1): (R)-2-allylpyrrolidine-2-carboxylic acid
  MOD_RES (3)..(3): (S)-2-amino-4,4-dimethylpentanoic acid
  MOD_RES (4)..(4): 2-amino-2-(pent-4-en-1-yl)hept-6-enoic acid
  MOD_RES (11)..(11): (S)-1-((allyloxy)carbonyl)-3-aminopyrrolidine-3-carboxylic acid
  MOD_RES (12)..(12): (S)-2-amino-3-(thiophen-3-yl)propanoic acid
  MOD_RES (13)..(13): (S)-2-amino-3-(benzo[b]thiophen-3-yl)propanoic acid
  C-term amino
XDXXDDAAFNXXXQ

SEQ ID NO: 1398 - protein, 14 aa, Artificial Sequence
  Description of Artificial Sequence: Synthetic peptide
  N-term Acetic Acid
  MOD_RES (1)..(1): (R)-2-allylpyrrolidine-2-carboxylic acid
  MOD_RES (3)..(3): (S)-2-amino-4,4-dimethylpentanoic acid
  MOD_RES (4)..(4): 2-amino-2-(pent-4-en-1-yl)hept-6-enoic acid
  MOD_RES (11)..(11): (S)-1-((allyloxy)carbonyl)-3-aminopyrrolidine-3-carboxylic acid
  MOD_RES (12)..(12): (S)-2-amino-3-(thiophen-3-yl)propanoic acid
  MOD_RES (13)..(13): (S)-2-amino-3-(benzo[b]thiophen-3-yl)propanoic acid
  C-term amino
XDXXDDAAFLXXXQ

SEQ ID NO: 1399 - protein, 14 aa, Artificial Sequence
  Description of Artificial Sequence: Synthetic peptide
  N-term Acetic Acid
  MOD_RES (1)..(1): (R)-2-allylpyrrolidine-2-carboxylic acid
  MOD_RES (3)..(3): (S)-2-amino-4,4-dimethylpentanoic acid
  MOD_RES (4)..(4): 2-amino-2-(pent-4-en-1-yl)hept-6-enoic acid
  MOD_RES (11)..(11): (S)-2-amino-2-methylnon-8-enoic acid
  MOD_RES (12)..(12): (S)-2-amino-3-(thiophen-3-yl)propanoic acid
  MOD_RES (13)..(13): (S)-2-amino-3-(benzo[b]thiophen-3-yl)propanoic acid
  C-term amino
XDXXDDAAFNXXXQ

SEQ ID NO: 1400 - protein, 14 aa, Artificial Sequence
  Description of Artificial Sequence: Synthetic peptide
  N-term Acetic Acid
  MOD_RES (1)..(1): (R)-2-allylpyrrolidine-2-carboxylic acid
  MOD_RES (3)..(3): (S)-2-amino-4,4-dimethylpentanoic acid
  MOD_RES (4)..(4): 2-amino-2-(pent-4-en-1-yl)hept-6-enoic acid
  MOD_RES (11)..(11): (S)-2-amino-2-methylnon-8-enoic acid
  MOD_RES (12)..(12): (S)-2-amino-3-(thiophen-3-yl)propanoic acid
  MOD_RES (13)..(13): (S)-2-amino-3-(benzo[b]thiophen-3-yl)propanoic acid
  C-term amino
XDXXDDAAFLXXXQ

SEQ ID NO: 1401 - protein, 14 aa, Artificial Sequence
  Description of Artificial Sequence: Synthetic peptide
  N-term Acetic Acid
  MOD_RES (1)..(1): (R)-2-allylpyrrolidine-2-carboxylic acid
  MOD_RES (3)..(3): (S)-2-amino-4,4-dimethylpentanoic acid
  MOD_RES (4)..(4): 2-amino-2-(pent-4-en-1-yl)hept-6-enoic acid
  MOD_RES (11)..(11): 1-((allyloxy)carbonyl)-3-aminoazetidine-3-carboxylic acid
  MOD_RES (12)..(12): (S)-2-amino-3-(thiophen-3-yl)propanoic acid
  MOD_RES (13)..(13): (S)-2-amino-3-(benzo[b]thiophen-3-yl)propanoic acid
  C-term amino
XDXXDDAAFNXXXQ

SEQ ID NO: 1402 - protein, 14 aa, Artificial Sequence
  Description of Artificial Sequence: Synthetic peptide
  N-term Acetic Acid
  MOD_RES (1)..(1): (R)-2-allylpyrrolidine-2-carboxylic acid
  MOD_RES (3)..(3): (S)-2-amino-4,4-dimethylpentanoic acid
  MOD_RES (4)..(4): 2-amino-2-(pent-4-en-1-yl)hept-6-enoic acid
  MOD_RES (11)..(11): 1-((allyloxy)carbonyl)-3-aminoazetidine-3-carboxylic acid
  MOD_RES (12)..(12): (S)-2-amino-3-(thiophen-3-yl)propanoic acid
  MOD_RES (13)..(13): (S)-2-amino-3-(benzo[b]thiophen-3-yl)propanoic acid
  C-term amino
XDXXDDAAFLXXXQ

SEQ ID NO: 1403 - protein, 14 aa, Artificial Sequence
  Description of Artificial Sequence: Synthetic peptide
  N-term Acetic Acid
  MOD_RES (1)..(1): (R)-2-allylpyrrolidine-2-carboxylic acid
  MOD_RES (3)..(3): (S)-2-amino-4,4-dimethylpentanoic acid
  MOD_RES (4)..(4): 2-amino-2-(pent-4-en-1-yl)hept-6-enoic acid
  MOD_RES (11)..(11): (S)-4-(((allyloxy)carbonyl)(methyl)amino)-2-amino-2- methylbutanoic acid
  MOD_RES (12)..(12): (S)-2-amino-3-(thiophen-3-yl)propanoic acid
  MOD_RES (13)..(13): (S)-2-amino-3-(benzo[b]thiophen-3-yl)propanoic acid
  C-term amino
XDXXDDAAFNXXXQ

SEQ ID NO: 1404 - protein, 14 aa, Artificial Sequence
  Description of Artificial Sequence: Synthetic peptide
  N-term Acetic Acid
  MOD_RES (1)..(1): (R)-2-allylpyrrolidine-2-carboxylic acid
  MOD_RES (3)..(3): (S)-2-amino-4,4-dimethylpentanoic acid
  MOD_RES (4)..(4): 2-amino-2-(pent-4-en-1-yl)hept-6-enoic acid
  MOD_RES (11)..(11): (S)-4-(((allyloxy)carbonyl)(methyl)amino)-2-amino-2- methylbutanoic acid
  MOD_RES (12)..(12): (S)-2-amino-3-(thiophen-3-yl)propanoic acid
  MOD_RES (13)..(13): (S)-2-amino-3-(benzo[b]thiophen-3-yl)propanoic acid
  C-term amino
XDXXDDAAFLXXXQ

SEQ ID NO: 1405 - protein, 14 aa, Artificial Sequence
  Description of Artificial Sequence: Synthetic peptide
  N-term Acetic Acid
  MOD_RES (1)..(1): (R)-2-allylpyrrolidine-2-carboxylic acid
  MOD_RES (3)..(3): (S)-2-amino-4,4-dimethylpentanoic acid
  MOD_RES (4)..(4): 2-amino-2-(pent-4-en-1-yl)hept-6-enoic acid
  MOD_RES (6)..(6): (S)-2-amino-3-((carboxymethyl)(2,2,2-trifluoroethyl)amino) propanoic acid
  MOD_RES (11)..(11): (S)-3-amino-1-((pent-4-en-1-yloxy)carbonyl)pyrrolidine-3- carboxylic acid
  MOD_RES (12)..(12): (S)-2-amino-3-(2-chlorophenyl)propanoic acid
  MOD_RES (13)..(13): (S)-2-amino-3-(benzo[b]thiophen-3-yl)propanoic acid
  C-term amino
XDXXDXAAFLXFXQ

SEQ ID NO: 1406 - protein, 14 aa, Artificial Sequence
  Description of Artificial Sequence: Synthetic peptide
  N-term Acetic Acid
  MOD_RES (1)..(1): (R)-2-allylpyrrolidine-2-carboxylic acid
  MOD_RES (3)..(3): (S)-2-amino-4,4-dimethylpentanoic acid
  MOD_RES (4)..(4): 2-amino-2-(pent-4-en-1-yl)hept-6-enoic acid
  MOD_RES (6)..(6): (S)-2-amino-4-(benzyl(carboxymethyl)amino)butanoic acid
  MOD_RES (11)..(11): (S)-3-amino-1-((pent-4-en-1-yloxy)carbonyl)pyrrolidine-3- carboxylic acid
  MOD_RES (12)..(12): (S)-2-amino-3-(thiophen-3-yl)propanoic acid
  MOD_RES (13)..(13): (S)-2-amino-3-(benzo[b]thiophen-3-yl)propanoic acid
  C-term amino
XDXXDXAAFLXXXQ

SEQ ID NO: 1407 - protein, 14 aa, Artificial Sequence
  Description of Artificial Sequence: Synthetic peptide
  N-term Acetic Acid
  MOD_RES (1)..(1): (R)-2-allylpyrrolidine-2-carboxylic acid
  MOD_RES (3)..(3): (S)-2-amino-4,4-dimethylpentanoic acid
  MOD_RES (4)..(4): 2-amino-2-(pent-4-en-1-yl)hept-6-enoic acid
  MOD_RES (6)..(6): (S)-2-amino-4-((carboxymethyl)(ethyl)amino)butanoic acid
  MOD_RES (11)..(11): (S)-3-amino-1-((pent-4-en-1-yloxy)carbonyl)pyrrolidine-3- carboxylic acid
  MOD_RES (12)..(12): (S)-2-amino-3-(thiophen-3-yl)propanoic acid
  MOD_RES (13)..(13): (S)-2-amino-3-(benzo[b]thiophen-3-yl)propanoic acid
  C-term amino
XDXXDXAAFLXXXQ

SEQ ID NO: 1408 - protein, 14 aa, Artificial Sequence
  Description of Artificial Sequence: Synthetic peptide
  N-term Acetic Acid
  MOD_RES (1)..(1): (R)-2-allylpyrrolidine-2-carboxylic acid
  MOD_RES (3)..(3): (S)-2-amino-4,4-dimethylpentanoic acid
  MOD_RES (4)..(4): 2-amino-2-(pent-4-en-1-yl)hept-6-enoic acid
  MOD_RES (6)..(6): (S)-2,2'-((3-amino-3-carboxypropyl)azanediyl)diacetic acid
  MOD_RES (11)..(11): (S)-3-amino-1-((pent-4-en-1-yloxy)carbonyl)pyrrolidine-3- carboxylic acid
  MOD_RES (12)..(12): (S)-2-amino-3-(thiophen-3-yl)propanoic acid
  MOD_RES (13)..(13): (S)-2-amino-3-(benzo[b]thiophen-3-yl)propanoic acid
  C-term amino
XDXXDXAAFLXXXQ

SEQ ID NO: 1409 - protein, 14 aa, Artificial Sequence
  Description of Artificial Sequence: Synthetic peptide
  N-term Acetic Acid
  MOD_RES (1)..(1): (R)-2-allylpyrrolidine-2-carboxylic acid
  MOD_RES (3)..(3): (S)-2-amino-4,4-dimethylpentanoic acid
  MOD_RES (4)..(4): 2-amino-2-(pent-4-en-1-yl)hept-6-enoic acid
  MOD_RES (6)..(6): (S)-2-amino-4-((carboxymethyl)(4,4,4-trifluorobutyl)amino) butanoic acid
  MOD_RES (11)..(11): (S)-3-amino-1-((pent-4-en-1-yloxy)carbonyl)pyrrolidine-3- carboxylic acid
  MOD_RES (12)..(12): (S)-2-amino-3-(thiophen-3-yl)propanoic acid
  MOD_RES (13)..(13): (S)-2-amino-3-(benzo[b]thiophen-3-yl)propanoic acid
  C-term amino
XDXXDXAAFLXXXQ

SEQ ID NO: 1410 - protein, 14 aa, Artificial Sequence
  Description of Artificial Sequence: Synthetic peptide
  N-term Acetic Acid
  MOD_RES (1)..(1): (R)-2-allylpyrrolidine-2-carboxylic acid
  MOD_RES (3)..(3): (S)-2-amino-4,4-dimethylpentanoic acid
  MOD_RES (4)..(4): 2-amino-2-(pent-4-en-1-yl)hept-6-enoic acid
  MOD_RES (6)..(6): (S)-2-amino-4-((carboxymethyl)((perfluorophenyl)methyl)amino) butanoic acid
  MOD_RES (11)..(11): (S)-3-amino-1-((pent-4-en-1-yloxy)carbonyl)pyrrolidine-3- carboxylic acid
  MOD_RES (12)..(12): (S)-2-amino-3-(thiophen-3-yl)propanoic acid
  MOD_RES (13)..(13): (S)-2-amino-3-(benzo[b]thiophen-3-yl)propanoic acid
  C-term amino
XDXXDXAAFLXXXQ

SEQ ID NO: 1411 - protein, 14 aa, Artificial Sequence
  Description of Artificial Sequence: Synthetic peptide
  N-term Acetic Acid
  MOD_RES (1)..(1): (R)-2-allylpyrrolidine-2-carboxylic acid
  MOD_RES (3)..(3): (S)-2-amino-4,4-dimethylpentanoic acid
  MOD_RES (4)..(4): 2-amino-2-(pent-4-en-1-yl)hept-6-enoic acid
  MOD_RES (6)..(6): (S)-2-amino-4-((carboxymethyl)(3,3,3-trifluoropropyl)amino) butanoic acid
  MOD_RES (11)..(11): (S)-3-amino-1-((pent-4-en-1-yloxy)carbonyl)pyrrolidine-3- carboxylic acid
  MOD_RES (12)..(12): (S)-2-amino-3-(thiophen-3-yl)propanoic acid
  MOD_RES (13)..(13): (S)-2-amino-3-(benzo[b]thiophen-3-yl)propanoic acid
  C-term amino
XDXXDXAAFLXXXQ

SEQ ID NO: 1412 - protein, 14 aa, Artificial Sequence
  Description of Artificial Sequence: Synthetic peptide
  N-term Acetic Acid
  MOD_RES (1)..(1): (R)-2-allylpyrrolidine-2-carboxylic acid
  MOD_RES (3)..(3): (S)-2-amino-4,4-dimethylpentanoic acid
  MOD_RES (4)..(4): 2-amino-2-(pent-4-en-1-yl)hept-6-enoic acid
  MOD_RES (6)..(6): (S)-2-amino-4-(N-(carboxymethyl)acetamido)butanoic acid
  MOD_RES (11)..(11): (S)-3-amino-1-((pent-4-en-1-yloxy)carbonyl)pyrrolidine-3- carboxylic acid
  MOD_RES (12)..(12): (S)-2-amino-3-(thiophen-3-yl)propanoic acid
  MOD_RES (13)..(13): (S)-2-amino-3-(benzo[b]thiophen-3-yl)propanoic acid
  C-term amino
XDXXDXAAFLXXXQ

SEQ ID NO: 1413 - protein, 14 aa, Artificial Sequence
  Description of Artificial Sequence: Synthetic peptide
  N-term Acetic Acid
  MOD_RES (1)..(1): (R)-2-allylpyrrolidine-2-carboxylic acid
  MOD_RES (3)..(3): (S)-2-amino-4,4-dimethylpentanoic acid
  MOD_RES (4)..(4): 2-amino-2-(pent-4-en-1-yl)hept-6-enoic acid
  MOD_RES (6)..(6): (S)-2-amino-4-((carboxymethyl)amino)butanoic acid
  MOD_RES (11)..(11): (S)-3-amino-1-((pent-4-en-1-yloxy)carbonyl)pyrrolidine-3- carboxylic acid
  MOD_RES (12)..(12): (S)-2-amino-3-(thiophen-3-yl)propanoic acid
  MOD_RES (13)..(13): (S)-2-amino-3-(benzo[b]thiophen-3-yl)propanoic acid
  C-term amino
XDXXDXAAFLXXXQ

SEQ ID NO: 1414 - protein, 14 aa, Artificial Sequence
  Description of Artificial Sequence: Synthetic peptide
  N-term Acetic Acid
  MOD_RES (1)..(1): (R)-2-allylpyrrolidine-2-carboxylic acid
  MOD_RES (3)..(3): (S)-2-amino-4,4-dimethylpentanoic acid
  MOD_RES (4)..(4): 2-amino-2-(pent-4-en-1-yl)hept-6-enoic acid
  MOD_RES (6)..(6): (S)-2-amino-4-((carboxymethyl)(2-morpholinoethyl)amino) butanoic acid
  MOD_RES (11)..(11): (S)-3-amino-1-((pent-4-en-1-yloxy)carbonyl)pyrrolidine-3- carboxylic acid
  MOD_RES (12)..(12): (S)-2-amino-3-(thiophen-3-yl)propanoic acid
  MOD_RES (13)..(13): (S)-2-amino-3-(benzo[b]thiophen-3-yl)propanoic acid
  C-term amino
XDXXDXAAFLXXXQ

SEQ ID NO: 1415 - protein, 14 aa, Artificial Sequence
  Description of Artificial Sequence: Synthetic peptide
  N-term Acetic Acid
  MOD_RES (1)..(1): (R)-2-allylpyrrolidine-2-carboxylic acid
  MOD_RES (3)..(3): (S)-2-amino-4,4-dimethylpentanoic acid
  MOD_RES (4)..(4): 2-amino-2-(pent-4-en-1-yl)hept-6-enoic acid
  MOD_RES (6)..(6): (S)-2-((2-amino-2-carboxyethyl)amino)-5-nitrobenzoic acid
  MOD_RES (11)..(11): (S)-3-amino-1-((pent-4-en-1-yloxy)carbonyl)pyrrolidine-3- carboxylic acid
  MOD_RES (12)..(12): (S)-2-amino-3-(thiophen-3-yl)propanoic acid
  MOD_RES (13)..(13): (S)-2-amino-3-(benzo[b]thiophen-3-yl)propanoic acid
  C-term amino
XDXXDXAAFLXXXQ

SEQ ID NO: 1416 - protein, 14 aa, Artificial Sequence
  Description of Artificial Sequence: Synthetic peptide
  N-term Acetic Acid
  MOD_RES (1)..(1): (R)-2-allylpyrrolidine-2-carboxylic acid
  MOD_RES (3)..(3): (S)-2-amino-4,4-dimethylpentanoic acid
  MOD_RES (4)..(4): 2-amino-2-(pent-4-en-1-yl)hept-6-enoic acid
  MOD_RES (6)..(6): (S)-5-((2-amino-2-carboxyethyl)amino)-2-nitrobenzoic acid
  MOD_RES (11)..(11): (S)-3-amino-1-((pent-4-en-1-yloxy)carbonyl)pyrrolidine-3- carboxylic acid
  MOD_RES (12)..(12): (S)-2-amino-3-(thiophen-3-yl)propanoic acid
  MOD_RES (13)..(13): (S)-2-amino-3-(benzo[b]thiophen-3-yl)propanoic acid
  C-term amino
XDXXDXAAFLXXXQ

SEQ ID NO: 1417 - protein, 14 aa, Artificial Sequence
  Description of Artificial Sequence: Synthetic peptide
  N-term Acetic Acid
  MOD_RES (1)..(1): (R)-2-allylpyrrolidine-2-carboxylic acid
  MOD_RES (3)..(3): (S)-2-amino-4,4-dimethylpentanoic acid
  MOD_RES (4)..(4): 2-amino-2-(pent-4-en-1-yl)hept-6-enoic acid
  MOD_RES (6)..(6): (S)-2-((2-amino-2-carboxyethyl)amino)nicotinic acid
  MOD_RES (11)..(11): (S)-3-amino-1-((pent-4-en-1-yloxy)carbonyl)pyrrolidine-3- carboxylic acid
  MOD_RES (12)..(12): (S)-2-amino-3-(thiophen-3-yl)propanoic acid
  MOD_RES (13)..(13): (S)-2-amino-3-(benzo[b]thiophen-3-yl)propanoic acid
  C-term amino
XDXXDXAAFLXXXQ

SEQ ID NO: 1418 - protein, 14 aa, Artificial Sequence
  Description of Artificial Sequence: Synthetic peptide
  N-term Acetic Acid
  MOD_RES (1)..(1): (2R,4S)-4-(pent-4-enoyloxy)pyrrolidine-2-carboxylic acid
  MOD_RES (3)..(3): (S)-2-amino-4,4-dimethylpentanoic acid
  MOD_RES (4)..(4): 2-amino-2-(pent-4-en-1-yl)hept-6-enoic acid
  MOD_RES (6)..(6): (S)-2-amino-3-((carboxymethyl)(2,2,2-trifluoroethyl)amino) propanoic acid
  MOD_RES (11)..(11): (S)-3-amino-1-((pent-4-en-1-yloxy)carbonyl)pyrrolidine-3- carboxylic acid
  MOD_RES (12)..(12): (S)-2-amino-3-(2-chlorophenyl)propanoic acid
  MOD_RES (13)..(13): (S)-2-amino-3-(benzo[b]thiophen-3-yl)propanoic acid
  C-term amino
XDXXDXAAFTXFXQ

SEQ ID NO: 1419 - protein, 14 aa, Artificial Sequence
  Description of Artificial Sequence: Synthetic peptide
  N-term Acetic Acid
  MOD_RES (1)..(1): (2R,4S)-4-(pent-4-enoyloxy)pyrrolidine-2-carboxylic acid
  MOD_RES (3)..(3): (S)-2-amino-4,4-dimethylpentanoic acid
  MOD_RES (4)..(4): 2-amino-2-(pent-4-en-1-yl)hept-6-enoic acid
  MOD_RES (6)..(6): (S)-3-(2-amino-2-carboxyethyl)benzoic acid
  MOD_RES (11)..(11): (S)-3-amino-1-((pent-4-en-1-yloxy)carbonyl)pyrrolidine-3- carboxylic acid
  MOD_RES (12)..(12): (S)-2-amino-3-(2-chlorophenyl)propanoic acid
  MOD_RES (13)..(13): (S)-2-amino-3-(benzo[b]thiophen-3-yl)propanoic acid
  C-term amino
XDXXDXAAFLXFXQ

SEQ ID NO: 1420 - protein, 14 aa, Artificial Sequence
  Description of Artificial Sequence: Synthetic peptide
  N-term Acetic Acid
  MOD_RES (1)..(1): (R)-2-allylpyrrolidine-2-carboxylic acid
  MOD_RES (3)..(3): (S)-2-amino-4,4-dimethylpentanoic acid
  MOD_RES (4)..(4): 2-amino-2-(pent-4-en-1-yl)hept-6-enoic acid
  MOD_RES (6)..(6): (R)-2-((2-amino-2-carboxyethyl)thio)-5-nitrobenzoic acid
  MOD_RES (11)..(11): (S)-3-amino-1-((pent-4-en-1-yloxy)carbonyl)pyrrolidine-3- carboxylic acid
  MOD_RES (12)..(12): (S)-2-amino-3-(thiophen-3-yl)propanoic acid
  MOD_RES (13)..(13): (S)-2-amino-3-(benzo[b]thiophen-3-yl)propanoic acid
  C-term amino
XDXXDXAAFLXXXQ

SEQ ID NO: 1421 - protein, 14 aa, Artificial Sequence
  Description of Artificial Sequence: Synthetic peptide
  N-term Acetic Acid
  MOD_RES (1)..(1): (R)-2-allylpyrrolidine-2-carboxylic acid
  MOD_RES (3)..(3): (S)-2-amino-4,4-dimethylpentanoic acid
  MOD_RES (4)..(4): 2-amino-2-(pent-4-en-1-yl)hept-6-enoic acid
  MOD_RES (6)..(6): (S)-3-(2-amino-2-carboxyethyl)benzoic acid
  MOD_RES (11)..(11): (S)-3-amino-1-((pent-4-en-1-yloxy)carbonyl)pyrrolidine-3- carboxylic acid
  MOD_RES (12)..(12): (S)-2-amino-3-(2-chlorophenyl)propanoic acid
  MOD_RES (13)..(13): (S)-2-amino-3-(benzo[b]thiophen-3-yl)propanoic acid
  C-term amino
XDXXDXAAFAXFXS

SEQ ID NO: 1422 - protein, 14 aa, Artificial Sequence
  Description of Artificial Sequence: Synthetic peptide
  N-term Acetic Acid
  MOD_RES (1)..(1): (R)-2-allylpyrrolidine-2-carboxylic acid
  MOD_RES (3)..(3): (S)-2-amino-4,4-dimethylpentanoic acid
  MOD_RES (4)..(4): 2-amino-2-(pent-4-en-1-yl)hept-6-enoic acid
  MOD_RES (6)..(6): (S)-3-(2-amino-2-carboxyethyl)benzoic acid
  MOD_RES (11)..(11): (S)-3-amino-1-((pent-4-en-1-yloxy)carbonyl)pyrrolidine-3- carboxylic acid
  MOD_RES (12)..(12): (S)-2-amino-3-(2-chlorophenyl)propanoic acid
  MOD_RES (13)..(13): (S)-2-amino-3-(benzo[b]thiophen-3-yl)propanoic acid
  C-term amino
XDXXDXAAFVXFXS

SEQ ID NO: 1423 - protein, 14 aa, Artificial Sequence
  Description of Artificial Sequence: Synthetic peptide
  N-term Acetic Acid
  MOD_RES (1)..(1): (R)-2-allylpyrrolidine-2-carboxylic acid
  MOD_RES (3)..(3): (S)-2-amino-4,4-dimethylpentanoic acid
  MOD_RES (4)..(4): 2-amino-2-(pent-4-en-1-yl)hept-6-enoic acid
  MOD_RES (6)..(6): (S)-3-(2-amino-2-carboxyethyl)benzoic acid
  MOD_RES (11)..(11): (S)-3-amino-1-((pent-4-en-1-yloxy)carbonyl)pyrrolidine-3- carboxylic acid
  MOD_RES (12)..(12): (S)-2-amino-3-(2-chlorophenyl)propanoic acid
  MOD_RES (13)..(13): (S)-2-amino-3-(benzo[b]thiophen-3-yl)propanoic acid
  C-term amino
XDXXDXAAFLXFXA

SEQ ID NO: 1424 - protein, 13 aa, Artificial Sequence
  Description of Artificial Sequence: Synthetic peptide
  N-term Acetic Acid
  MOD_RES (1)..(1): (R)-2-allylpyrrolidine-2-carboxylic acid
  MOD_RES (3)..(3): (S)-2-amino-4,4-dimethylpentanoic acid
  MOD_RES (4)..(4): 2-amino-2-(pent-4-en-1-yl)hept-6-enoic acid
  MOD_RES (6)..(6): (S)-3-(2-amino-2-carboxyethyl)benzoic acid
  MOD_RES (11)..(11): (S)-3-amino-1-((pent-4-en-1-yloxy)carbonyl)pyrrolidine-3- carboxylic acid
  MOD_RES (12)..(12): (S)-2-amino-3-(2-chlorophenyl)propanoic acid
  MOD_RES (13)..(13): (S)-2-amino-3-(benzo[b]thiophen-3-yl)propanoic acid
  C-term amino
XDXXDXAAFLXFX

SEQ ID NO: 1425 - protein, 14 aa, Artificial Sequence
  Description of Artificial Sequence: Synthetic peptide
  N-term Acetic Acid
  MOD_RES (1)..(1): (R)-2-allylpyrrolidine-2-carboxylic acid
  MOD_RES (3)..(3): (S)-2-amino-4,4-dimethylpentanoic acid
  MOD_RES (4)..(4): 2-amino-2-(pent-4-en-1-yl)hept-6-enoic acid
  MOD_RES (6)..(6): (S)-3-(2-amino-2-carboxyethyl)benzoic acid
  MOD_RES (11)..(11): (S)-3-amino-1-((pent-4-en-1-yloxy)carbonyl)pyrrolidine-3- carboxylic acid
  MOD_RES (12)..(12): (S)-2-amino-3-(2-chlorophenyl)propanoic acid
  MOD_RES (13)..(13): (S)-2-amino-3-(benzo[b]thiophen-3-yl)propanoic acid
  C-term amino
XNXXDXAAFLXFXS

SEQ ID NO: 1426 - protein, 14 aa, Artificial Sequence
  Description of Artificial Sequence: Synthetic peptide
  N-term Acetic Acid
  MOD_RES (1)..(1): (R)-2-allylpyrrolidine-2-carboxylic acid
  MOD_RES (3)..(3): (S)-2-amino-4,4-dimethylpentanoic acid
  MOD_RES (4)..(4): 2-amino-2-(pent-4-en-1-yl)hept-6-enoic acid
  MOD_RES (6)..(6): (S)-2-amino-3-((carboxymethyl)(2,2,2-trifluoroethyl)amino) propanoic acid
  MOD_RES (9)..(9): (S)-2-amino-3-(4-((dimethylamino)methyl)-1H-1,2,3-triazol-1-yl) propanoic acid
  MOD_RES (11)..(11): (S)-3-amino-1-((pent-4-en-1-yloxy)carbonyl)pyrrolidine-3- carboxylic acid
  MOD_RES (12)..(12): (S)-2-amino-3-(thiophen-3-yl)propanoic acid
  MOD_RES (13)..(13): (S)-2-amino-3-(benzo[b]thiophen-3-yl)propanoic acid
  C-term amino
XDXXDXAAXLXXXQ

SEQ ID NO: 1427 - protein, 14 aa, Artificial Sequence
  Description of Artificial Sequence: Synthetic peptide
  N-term Acetic Acid
  MOD_RES (1)..(1): (R)-2-allylpyrrolidine-2-carboxylic acid
  MOD_RES (3)..(3): (S)-2-amino-4,4-dimethylpentanoic acid
  MOD_RES (4)..(4): 2-amino-2-(pent-4-en-1-yl)hept-6-enoic acid
  MOD_RES (6)..(6): (S)-2-amino-3-((carboxymethyl)(2,2,2-trifluoroethyl)amino) propanoic acid
  MOD_RES (9)..(9): (S)-2-amino-3-(4-(piperazin-1-ylmethyl)-1H-1,2,3-triazol-1-yl) propanoic acid
  MOD_RES (11)..(11): (S)-3-amino-1-((pent-4-en-1-yloxy)carbonyl)pyrrolidine-3- carboxylic acid
  MOD_RES (12)..(12): (S)-2-amino-3-(thiophen-3-yl)propanoic acid
  MOD_RES (13)..(13): (S)-2-amino-3-(benzo[b]thiophen-3-yl)propanoic acid
  C-term amino
XDXXDXAAXLXXXQ

SEQ ID NO: 1428 - protein, 14 aa, Artificial Sequence
  Description of Artificial Sequence: Synthetic peptide
  N-term Acetic Acid
  MOD_RES (1)..(1): (R)-2-allylpyrrolidine-2-carboxylic acid
  MOD_RES (3)..(3): (S)-2-amino-4,4-dimethylpentanoic acid
  MOD_RES (4)..(4): 2-amino-2-(pent-4-en-1-yl)hept-6-enoic acid
  MOD_RES (6)..(6): (S)-2-amino-3-((carboxymethyl)(2,2,2-trifluoroethyl)amino) propanoic acid
  MOD_RES (9)..(9): (S)-2-amino-3-(4-(morpholinomethyl)-1H-1,2,3-triazol-1-yl) propanoic acid
  MOD_RES (11)..(11): (S)-3-amino-1-((pent-4-en-1-yloxy)carbonyl)pyrrolidine-3- carboxylic acid
  MOD_RES (12)..(12): (S)-2-amino-3-(thiophen-3-yl)propanoic acid
  MOD_RES (13)..(13): (S)-2-amino-3-(benzo[b]thiophen-3-yl)propanoic acid
  C-term amino
XDXXDXAAXLXXXQ

SEQ ID NO: 1429 - protein, 14 aa, Artificial Sequence
  Description of Artificial Sequence: Synthetic peptide
  N-term Acetic Acid
  MOD_RES (1)..(1): (R)-2-allylpyrrolidine-2-carboxylic acid
  MOD_RES (3)..(3): (S)-2-amino-4,4-dimethylpentanoic acid
  MOD_RES (4)..(4): 2-amino-2-(pent-4-en-1-yl)hept-6-enoic acid
  MOD_RES (6)..(6): (S)-2-amino-3-((carboxymethyl)(2,2,2-trifluoroethyl)amino) propanoic acid
  MOD_RES (9)..(9): (S)-2-amino-3-(4-((1,1-dioxidothiomorpholino)methyl)-1H-1,2,3 -triazol-1-yl)propanoic acid
  MOD_RES (11)..(11): (S)-3-amino-1-((pent-4-en-1-yloxy)carbonyl)pyrrolidine-3- carboxylic acid
  MOD_RES (12)..(12): (S)-2-amino-3-(thiophen-3-yl)propanoic acid
  MOD_RES (13)..(13): (S)-2-amino-3-(benzo[b]thiophen-3-yl)propanoic acid
  C-term amino
XDXXDXAAXLXXXQ

SEQ ID NO: 1430 - protein, 14 aa, Artificial Sequence
  Description of Artificial Sequence: Synthetic peptide
  N-term Acetic Acid
  MOD_RES (1)..(1): (R)-2-allylpyrrolidine-2-carboxylic acid
  MOD_RES (3)..(3): (S)-2-amino-4,4-dimethylpentanoic acid
  MOD_RES (4)..(4): 2-amino-2-(pent-4-en-1-yl)hept-6-enoic acid
  MOD_RES (6)..(6): (S)-2-amino-3-((carboxymethyl)(2,2,2-trifluoroethyl)amino) propanoic acid
  MOD_RES (10)..(10): (S)-2-amino-3-(4-((dimethylamino)methyl)-1H-1,2,3-triazol-1-yl) propanoic acid
  MOD_RES (11)..(11): (S)-3-amino-1-((pent-4-en-1-yloxy)carbonyl)pyrrolidine-3- carboxylic acid
  MOD_RES (12)..(12): (S)-2-amino-3-(thiophen-3-yl)propanoic acid
  MOD_RES (13)..(13): (S)-2-amino-3-(benzo[b]thiophen-3-yl)propanoic acid
  C-term amino
XDXXDXAAFXXXXQ

SEQ ID NO: 1431 - protein, 14 aa, Artificial Sequence
  Description of Artificial Sequence: Synthetic peptide
  N-term Acetic Acid
  MOD_RES (1)..(1): (R)-2-allylpyrrolidine-2-carboxylic acid
  MOD_RES (3)..(3): (S)-2-amino-4,4-dimethylpentanoic acid
  MOD_RES (4)..(4): 2-amino-2-(pent-4-en-1-yl)hept-6-enoic acid
  MOD_RES (6)..(6): (S)-2-amino-3-((carboxymethyl)(2,2,2-trifluoroethyl)amino) propanoic acid
  MOD_RES (10)..(10): (S)-2-amino-3-(4-(piperazin-1-ylmethyl)-1H-1,2,3-triazol-1-yl) propanoic acid
  MOD_RES (11)..(11): (S)-3-amino-1-((pent-4-en-1-yloxy)carbonyl)pyrrolidine-3- carboxylic acid
  MOD_RES (12)..(12): (S)-2-amino-3-(thiophen-3-yl)propanoic acid
  MOD_RES (13)..(13): (S)-2-amino-3-(benzo[b]thiophen-3-yl)propanoic acid
  C-term amino
XDXXDXAAFXXXXQ

SEQ ID NO: 1432 - protein, 14 aa, Artificial Sequence
  Description of Artificial Sequence: Synthetic peptide
  N-term Acetic Acid
  MOD_RES (1)..(1): (R)-2-allylpyrrolidine-2-carboxylic acid
  MOD_RES (3)..(3): (S)-2-amino-4,4-dimethylpentanoic acid
  MOD_RES (4)..(4): 2-amino-2-(pent-4-en-1-yl)hept-6-enoic acid
  MOD_RES (6)..(6): (S)-2-amino-3-((carboxymethyl)(2,2,2-trifluoroethyl)amino) propanoic acid
  MOD_RES (10)..(10): (S)-2-amino-3-(4-(morpholinomethyl)-1H-1,2,3-triazol-1-yl) propanoic acid
  MOD_RES (11)..(11): (S)-3-amino-1-((pent-4-en-1-yloxy)carbonyl)pyrrolidine-3- carboxylic acid
  MOD_RES (12)..(12): (S)-2-amino-3-(thiophen-3-yl)propanoic acid
  MOD_RES (13)..(13): (S)-2-amino-3-(benzo[b]thiophen-3-yl)propanoic acid
  C-term amino
XDXXDXAAFXXXXQ

SEQ ID NO: 1433 - protein, 14 aa, Artificial Sequence
  Description of Artificial Sequence: Synthetic peptide
  N-term Acetic Acid
  MOD_RES (1)..(1): (R)-2-allylpyrrolidine-2-carboxylic acid
  MOD_RES (3)..(3): (S)-2-amino-4,4-dimethylpentanoic acid
  MOD_RES (4)..(4): 2-amino-2-(pent-4-en-1-yl)hept-6-enoic acid
  MOD_RES (6)..(6): (S)-2-amino-3-((carboxymethyl)(2,2,2-trifluoroethyl)amino) propanoic acid
  MOD_RES (10)..(10): (S)-2-amino-3-(4-((1,1-dioxidothiomorpholino)methyl)-1H-1,2,3 -triazol-1-yl)propanoic acid
  MOD_RES (11)..(11): (S)-3-amino-1-((pent-4-en-1-yloxy)carbonyl)pyrrolidine-3- carboxylic acid
  MOD_RES (12)..(12): (S)-2-amino-3-(thiophen-3-yl)propanoic acid
  MOD_RES (13)..(13): (S)-2-amino-3-(benzo[b]thiophen-3-yl)propanoic acid
  C-term amino
XDXXDXAAFXXXXQ

SEQ ID NO: 1434 - protein, 14 aa, Artificial Sequence
  Description of Artificial Sequence: Synthetic peptide
  N-term Acetic Acid
  MOD_RES (1)..(1): (R)-2-allylpyrrolidine-2-carboxylic acid
  MOD_RES (3)..(3): (S)-2-amino-4,4-dimethylpentanoic acid
  MOD_RES (4)..(4): 2-amino-2-(pent-4-en-1-yl)hept-6-enoic acid
  MOD_RES (11)..(11): (S)-3-amino-1-((pent-4-en-1-yloxy)carbonyl)pyrrolidine-3- carboxylic acid
  MOD_RES (12)..(12): (S)-2-amino-3-(thiophen-3-yl)propanoic acid
  MOD_RES (13)..(13): (S)-2-amino-3-(naphthalen-1-yl)propanoic acid
  C-term amino
XDXXNTAAFNXXXQ

SEQ ID NO: 1435 - protein, 14 aa, Artificial Sequence
  Description of Artificial Sequence: Synthetic peptide
  N-term Acetic Acid
  MOD_RES (1)..(1): (R)-2-allylpyrrolidine-2-carboxylic acid
  MOD_RES (3)..(3): (S)-2-amino-4,4-dimethylpentanoic acid
  MOD_RES (4)..(4): 2-amino-2-(pent-4-en-1-yl)hept-6-enoic acid
  MOD_RES (11)..(11): (S)-3-amino-1-((pent-4-en-1-yloxy)carbonyl)pyrrolidine-3- carboxylic acid
  MOD_RES (12)..(12): (S)-2-amino-3-(thiophen-3-yl)propanoic acid
  MOD_RES (13)..(13): (S)-2-amino-3-(naphthalen-2-yl)propanoic acid
  C-term amino
XDXXNTAAFNXXXQ

SEQ ID NO: 1436 - protein, 14 aa, Artificial Sequence
  Description of Artificial Sequence: Synthetic peptide
  N-term Acetic Acid
  MOD_RES (1)..(1): (R)-2-allylpyrrolidine-2-carboxylic acid
  MOD_RES (3)..(3): (S)-2-amino-4,4-dimethylpentanoic acid
  MOD_RES (4)..(4): 2-amino-2-(pent-4-en-1-yl)hept-6-enoic acid
  MOD_RES (11)..(11): (S)-3-amino-1-((pent-4-en-1-yloxy)carbonyl)pyrrolidine-3- carboxylic acid
  MOD_RES (12)..(12): (S)-2-amino-3-(thiophen-3-yl)propanoic acid
  MOD_RES (13)..(13): (S)-2-amino-3-cyclohexylpropanoic acid
  C-term amino
XDXXNTAAFNXXXQ

SEQ ID NO: 1437 - protein, 14 aa, Artificial Sequence
  Description of Artificial Sequence: Synthetic peptide
  N-term Acetic Acid
  MOD_RES (1)..(1): (R)-2-allylpyrrolidine-2-carboxylic acid
  MOD_RES (3)..(3): (S)-2-amino-4,4-dimethylpentanoic acid
  MOD_RES (4)..(4): 2-amino-2-(pent-4-en-1-yl)hept-6-enoic acid
  MOD_RES (11)..(11): (S)-3-amino-1-((pent-4-en-1-yloxy)carbonyl)pyrrolidine-3- carboxylic acid
  MOD_RES (12)..(12): (S)-2-amino-3-(thiophen-3-yl)propanoic acid
  C-term amino
XDXXNTAAFNXXWQ

SEQ ID NO: 1438 - protein, 14 aa, Artificial Sequence
  Description of Artificial Sequence: Synthetic peptide
  N-term Acetic Acid
  MOD_RES (1)..(1): (R)-2-allylpyrrolidine-2-carboxylic acid
  MOD_RES (3)..(3): (S)-2-amino-4,4-dimethylpentanoic acid
  MOD_RES (4)..(4): 2-amino-2-(pent-4-en-1-yl)hept-6-enoic acid
  MOD_RES (11)..(11): (S)-3-amino-1-((pent-4-en-1-yloxy)carbonyl)pyrrolidine-3- carboxylic acid
  MOD_RES (12)..(12): (S)-2-amino-3-(thiophen-3-yl)propanoic acid
  MOD_RES (13)..(13): (S)-2-amino-3-(benzo[b]thiophen-3-yl)propanoic acid
  C-term amino
XDXXNTAAFNXXXV

SEQ ID NO: 1439 - protein, 14 aa, Artificial Sequence
  Description of Artificial Sequence: Synthetic peptide
  N-term Acetic Acid
  MOD_RES (1)..(1): (R)-2-allylpyrrolidine-2-carboxylic acid
  MOD_RES (3)..(3): (S)-2-amino-4,4-dimethylpentanoic acid
  MOD_RES (4)..(4): 2-amino-2-(pent-4-en-1-yl)hept-6-enoic acid
  MOD_RES (11)..(11): (S)-3-amino-1-((pent-4-en-1-yloxy)carbonyl)pyrrolidine-3- carboxylic acid
  MOD_RES (12)..(12): (S)-2-amino-3-(thiophen-3-yl)propanoic acid
  MOD_RES (13)..(13): (S)-2-amino-3-(benzo[b]thiophen-3-yl)propanoic acid
  C-term amino
XDXXNTAAFNXXXL

SEQ ID NO: 1440 - protein, 14 aa, Artificial Sequence
  Description of Artificial Sequence: Synthetic peptide
  N-term Acetic Acid
  MOD_RES (1)..(1): (R)-2-allylpyrrolidine-2-carboxylic acid
  MOD_RES (3)..(3): (S)-2-amino-4,4-dimethylpentanoic acid
  MOD_RES (4)..(4): 2-amino-2-(pent-4-en-1-yl)hept-6-enoic acid
  MOD_RES (11)..(11): (S)-3-amino-1-((pent-4-en-1-yloxy)carbonyl)pyrrolidine-3- carboxylic acid
  MOD_RES (12)..(12): (S)-2-amino-3-(thiophen-3-yl)propanoic acid
  MOD_RES (13)..(13): (S)-2-amino-3-(benzo[b]thiophen-3-yl)propanoic acid
  C-term amino
XDXXNTAAFRXXXQ

SEQ ID NO: 1441 - protein, 14 aa, Artificial Sequence
  Description of Artificial Sequence: Synthetic peptide
  N-term Acetic Acid
  MOD_RES (1)..(1): (R)-2-allylpyrrolidine-2-carboxylic acid
  MOD_RES (3)..(3): (S)-2-amino-3-cyclohexylpropanoic acid
  MOD_RES (4)..(4): 2-amino-2-(pent-4-en-1-yl)hept-6-enoic acid
  MOD_RES (11)..(11): (S)-3-amino-1-((pent-4-en-1-yloxy)carbonyl)pyrrolidine-3- carboxylic acid
  MOD_RES (12)..(12): (S)-2-amino-3-(thiophen-3-yl)propanoic acid
  MOD_RES (13)..(13): (S)-2-amino-3-(benzo[b]thiophen-3-yl)propanoic acid
  C-term amino
XDXXNTAAFNXXXQ

SEQ ID NO: 1442 - protein, 14 aa, Artificial Sequence
  Description of Artificial Sequence: Synthetic peptide
  N-term Acetic Acid
  MOD_RES (1)..(1): (R)-2-allylpyrrolidine-2-carboxylic acid
  MOD_RES (3)..(3): (S)-2-amino-4,4-dimethylpentanoic acid
  MOD_RES (4)..(4): 2-amino-2-(pent-4-en-1-yl)hept-6-enoic acid
  MOD_RES (11)..(11): (S)-3-amino-1-((pent-4-en-1-yloxy)carbonyl)pyrrolidine-3- carboxylic acid
  MOD_RES (12)..(12): (S)-2-amino-3-(thiophen-3-yl)propanoic acid
  MOD_RES (13)..(13): (S)-2-amino-3-(benzo[b]thiophen-3-yl)propanoic acid
  C-term amino
XDXXRDAAFNXXXQ

SEQ ID NO: 1443 - protein, 14 aa, Artificial Sequence
  Description of Artificial Sequence: Synthetic peptide
  N-term Acetic Acid
  MOD_RES (1)..(1): (R)-2-allylpyrrolidine-2-carboxylic acid
  MOD_RES (3)..(3): (S)-2-amino-4,4-dimethylpentanoic acid
  MOD_RES (4)..(4): 2-amino-2-(pent-4-en-1-yl)hept-6-enoic acid
  MOD_RES (11)..(11): (S)-3-amino-1-((pent-4-en-1-yloxy)carbonyl)pyrrolidine-3- carboxylic acid
  MOD_RES (12)..(12): (S)-2-amino-3-(thiophen-3-yl)propanoic acid
  MOD_RES (13)..(13): (S)-2-amino-3-(benzo[b]thiophen-3-yl)propanoic acid
  C-term amino
XDXXRTAAFNXXXQ

SEQ ID NO: 1444 - protein, 14 aa, Artificial Sequence
  Description of Artificial Sequence: Synthetic peptide
  N-term Acetic Acid
  MOD_RES (1)..(1): (R)-2-allylpyrrolidine-2-carboxylic acid
  MOD_RES (3)..(3): (S)-2-amino-4,4-dimethylpentanoic acid
  MOD_RES (4)..(4): 2-amino-2-(pent-4-en-1-yl)hept-6-enoic acid
  MOD_RES (11)..(11): (S)-3-amino-1-((pent-4-en-1-yloxy)carbonyl)pyrrolidine-3- carboxylic acid
  MOD_RES (12)..(12): (S)-2-amino-3-(thiophen-3-yl)propanoic acid
  MOD_RES (13)..(13): (S)-2-amino-3-(benzo[b]thiophen-3-yl)propanoic acid
  C-term amino
XDXXDRAAFNXXXQ

SEQ ID NO: 1445 - protein, 14 aa, Artificial Sequence
  Description of Artificial Sequence: Synthetic peptide
  N-term Acetic Acid
  MOD_RES (1)..(1): (R)-2-allylpyrrolidine-2-carboxylic acid
  MOD_RES (3)..(3): (S)-2-amino-4,4-dimethylpentanoic acid
  MOD_RES (4)..(4): 2-amino-2-(pent-4-en-1-yl)hept-6-enoic acid
  MOD_RES (11)..(11): (S)-3-amino-1-((pent-4-en-1-yloxy)carbonyl)pyrrolidine-3- carboxylic acid
  MOD_RES (12)..(12): (S)-2-amino-3-(thiophen-3-yl)propanoic acid
  MOD_RES (13)..(13): (S)-2-amino-3-(benzo[b]thiophen-3-yl)propanoic acid
  C-term amino
XDXXNRAAFNXXXQ

SEQ ID NO: 1446 - protein, 14 aa, Artificial Sequence
  Description of Artificial Sequence: Synthetic peptide
  N-term Acetic Acid
  MOD_RES (1)..(1): (R)-2-allylpyrrolidine-2-carboxylic acid
  MOD_RES (3)..(3): (S)-2-amino-4,4-dimethylpentanoic acid
  MOD_RES (4)..(4): 2-amino-2-(pent-4-en-1-yl)hept-6-enoic acid
  MOD_RES (6)..(6): (S)-3-(2-amino-2-carboxyethyl)benzoic acid
  MOD_RES (9)..(9): (S)-2-amino-3-cyclopentylpropanoic acid
  MOD_RES (11)..(11): (S)-3-amino-1-((pent-4-en-1-yloxy)carbonyl)pyrrolidine-3- carboxylic acid
  MOD_RES (12)..(12): (S)-2-amino-3-(2-chlorophenyl)propanoic acid
  MOD_RES (13)..(13): (S)-2-amino-3-(benzo[b]thiophen-3-yl)propanoic acid
  C-term amino
XDXXDXAAXLXFXS

SEQ ID NO: 1447 - protein, 14 aa, Artificial Sequence
  Description of Artificial Sequence: Synthetic peptide
  N-term Acetic Acid
  MOD_RES (1)..(1): (R)-2-allylpyrrolidine-2-carboxylic acid
  MOD_RES (3)..(3): (S)-2-amino-4,4-dimethylpentanoic acid
  MOD_RES (4)..(4): 2-amino-2-(pent-4-en-1-yl)hept-6-enoic acid
  MOD_RES (6)..(6): (S)-3-(2-amino-2-carboxyethyl)benzoic acid
  MOD_RES (9)..(9): (S)-2-amino-3-cyclobutylpropanoic acid
  MOD_RES (11)..(11): (S)-3-amino-1-((pent-4-en-1-yloxy)carbonyl)pyrrolidine-3- carboxylic acid
  MOD_RES (12)..(12): (S)-2-amino-3-(2-chlorophenyl)propanoic acid
  MOD_RES (13)..(13): (S)-2-amino-3-(benzo[b]thiophen-3-yl)propanoic acid
  C-term amino
XDXXDXAAXLXFXS

SEQ ID NO: 1448 - protein, 14 aa, Artificial Sequence
  Description of Artificial Sequence: Synthetic peptide
  N-term Acetic Acid
  MOD_RES (1)..(1): (R)-2-allylpyrrolidine-2-carboxylic acid
  MOD_RES (3)..(3): (S)-2-amino-4,4-dimethylpentanoic acid
  MOD_RES (4)..(4): 2-amino-2-(pent-4-en-1-yl)hept-6-enoic acid
  MOD_RES (6)..(6): (S)-3-(2-amino-2-carboxyethyl)benzoic acid
  MOD_RES (11)..(11): (S)-3-amino-1-((pent-4-en-1-yloxy)carbonyl)pyrrolidine-3- carboxylic acid
  MOD_RES (12)..(12): (S)-2-amino-3-cyclopentylpropanoic acid
  MOD_RES (13)..(13): (S)-2-amino-3-(benzo[b]thiophen-3-yl)propanoic acid
  C-term amino
XDXXDXAAFLXXXS

SEQ ID NO: 1449 - protein, 14 aa, Artificial Sequence
  Description of Artificial Sequence: Synthetic peptide
  N-term Acetic Acid
  MOD_RES (1)..(1): (R)-2-allylpyrrolidine-2-carboxylic acid
  MOD_RES (3)..(3): (S)-2-amino-4,4-dimethylpentanoic acid
  MOD_RES (4)..(4): 2-amino-2-(pent-4-en-1-yl)hept-6-enoic acid
  MOD_RES (6)..(6): (S)-3-(2-amino-2-carboxyethyl)benzoic acid
  MOD_RES (11)..(11): (S)-3-amino-1-((pent-4-en-1-yloxy)carbonyl)pyrrolidine-3- carboxylic acid
  MOD_RES (12)..(12): (S)-2-amino-3-cyclobutylpropanoic acid
  MOD_RES (13)..(13): (S)-2-amino-3-(benzo[b]thiophen-3-yl)propanoic acid
  C-term amino
XDXXDXAAFLXXXS

SEQ ID NO: 1450 - protein, 14 aa, Artificial Sequence
  Description of Artificial Sequence: Synthetic peptide
  N-term Acetic Acid
  MOD_RES (1)..(1): (R)-2-allylpyrrolidine-2-carboxylic acid
  MOD_RES (3)..(3): (S)-2-amino-4,4-dimethylpentanoic acid
  MOD_RES (4)..(4): 2-amino-2-(pent-4-en-1-yl)hept-6-enoic acid
  MOD_RES (6)..(6): (S)-3-(2-amino-2-carboxyethyl)benzoic acid
  MOD_RES (7)..(7): 2-amino-2-methylpropanoic acid
  MOD_RES (11)..(11): (S)-3-amino-1-((pent-4-en-1-yloxy)carbonyl)pyrrolidine-3- carboxylic acid
  MOD_RES (12)..(12): (S)-2-amino-3-(2-chlorophenyl)propanoic acid
  MOD_RES (13)..(13): (S)-2-amino-3-(benzo[b]thiophen-3-yl)propanoic acid
  C-term amino
XDXXDXXAFLXFXS

SEQ ID NO: 1451 - protein, 14 aa, Artificial Sequence
  Description of Artificial Sequence: Synthetic peptide
  N-term Acetic Acid
  MOD_RES (1)..(1): (R)-2-allylpyrrolidine-2-carboxylic acid
  MOD_RES (3)..(3): (S)-2-amino-4,4-dimethylpentanoic acid
  MOD_RES (4)..(4): 2-amino-2-(pent-4-en-1-yl)hept-6-enoic acid
  MOD_RES (6)..(6): (S)-3-(2-amino-2-carboxyethyl)benzoic acid
  MOD_RES (11)..(11): (S)-3-amino-1-((pent-4-en-1-yloxy)carbonyl)pyrrolidine-3- carboxylic acid
  MOD_RES (12)..(12): (S)-2-amino-3-(2-chlorophenyl)propanoic acid
  MOD_RES (13)..(13): (S)-2-amino-3-(benzo[b]thiophen-3-yl)propanoic acid
  C-term amino
XDXXDXSAFLXFXS

SEQ ID NO: 1452 - protein, 14 aa, Artificial Sequence
  Description of Artificial Sequence: Synthetic peptide
  N-term Acetic Acid
  MOD_RES (1)..(1): (R)-2-allylpyrrolidine-2-carboxylic acid
  MOD_RES (3)..(3): (S)-2-amino-4,4-dimethylpentanoic acid
  MOD_RES (4)..(4): 2-amino-2-(pent-4-en-1-yl)hept-6-enoic acid
  MOD_RES (6)..(6): (S)-3-(2-amino-2-carboxyethyl)benzoic acid
  MOD_RES (11)..(11): (S)-3-amino-1-((pent-4-en-1-yloxy)carbonyl)pyrrolidine-3- carboxylic acid
  MOD_RES (12)..(12): (S)-2-amino-3-(2-chlorophenyl)propanoic acid
  MOD_RES (13)..(13): (S)-2-amino-3-(benzo[b]thiophen-3-yl)propanoic acid
  C-term amino
XDXXDXAAFSXFXS

SEQ ID NO: 1453 - protein, 14 aa, Artificial Sequence
  Description of Artificial Sequence: Synthetic peptide
  N-term Acetic Acid
  MOD_RES (1)..(1): (R)-2-allylpyrrolidine-2-carboxylic acid
  MOD_RES (3)..(3): (S)-2-amino-4,4-dimethylpentanoic acid
  MOD_RES (4)..(4): 2-amino-2-(pent-4-en-1-yl)hept-6-enoic acid
  MOD_RES (6)..(6): (S)-3-(2-amino-2-carboxyethyl)benzoic acid
  MOD_RES (11)..(11): (S)-3-amino-1-((pent-4-en-1-yloxy)carbonyl)pyrrolidine-3- carboxylic acid
  MOD_RES (12)..(12): (S)-2-amino-3-(2-chlorophenyl)propanoic acid
  MOD_RES (13)..(13): (S)-2-amino-3-(benzo[b]thiophen-3-yl)propanoic acid
  C-term amino
XDXXDXAAFLXFXN

SEQ ID NO: 1454 - protein, 14 aa, Artificial Sequence
  Description of Artificial Sequence: Synthetic peptide
  N-term Acetic Acid
  MOD_RES (1)..(1): (R)-2-allylpyrrolidine-2-carboxylic acid
  MOD_RES (3)..(3): (S)-2-amino-4,4-dimethylpentanoic acid
  MOD_RES (4)..(4): 2-amino-2-(pent-4-en-1-yl)hept-6-enoic acid
  MOD_RES (6)..(6): (S)-3-(2-amino-2-carboxyethyl)benzoic acid
  MOD_RES (11)..(11): (S)-3-amino-1-((pent-4-en-1-yloxy)carbonyl)pyrrolidine-3- carboxylic acid
  MOD_RES (12)..(12): (S)-2-amino-3-(2-chlorophenyl)propanoic acid
  MOD_RES (13)..(13): (S)-2-amino-3-(benzo[b]thiophen-3-yl)propanoic acid
  C-term (2R,3R)-2-aminobutane-1,3-diol
XDXXDXAAFLXFXS

SEQ ID NO: 1455 - protein, 14 aa, Artificial Sequence
  Description of Artificial Sequence: Synthetic peptide
  N-term Acetic Acid
  MOD_RES (1)..(1): (R)-2-allylpyrrolidine-2-carboxylic acid
  MOD_RES (3)..(3): (S)-2-amino-4,4-dimethylpentanoic acid
  MOD_RES (4)..(4): 2-amino-2-(pent-4-en-1-yl)hept-6-enoic acid
  MOD_RES (6)..(6): (S)-3-(2-amino-2-carboxyethyl)benzoic acid
  MOD_RES (11)..(11): (S)-3-amino-1-((pent-4-en-1-yloxy)carbonyl)pyrrolidine-3- carboxylic acid
  MOD_RES (12)..(12): (S)-2-amino-3-(2-chlorophenyl)propanoic acid
  MOD_RES (13)..(13): (S)-2-amino-3-(benzo[b]thiophen-3-yl)propanoic acid
  C-term (S)-pyrrolidin-2-ylmethanol
XDXXDXAAFLXFXS

SEQ ID NO: 1456 - protein, 14 aa, Artificial Sequence
  Description of Artificial Sequence: Synthetic peptide
  N-term Acetic Acid
  MOD_RES (1)..(1): (R)-2-allylpyrrolidine-2-carboxylic acid
  MOD_RES (3)..(3): (S)-2-amino-4,4-dimethylpentanoic acid
  MOD_RES (4)..(4): 2-amino-2-(pent-4-en-1-yl)hept-6-enoic acid
  MOD_RES (6)..(6): (S)-3-(2-amino-2-carboxyethyl)benzoic acid
  MOD_RES (11)..(11): (S)-3-amino-1-((pent-4-en-1-yloxy)carbonyl)pyrrolidine-3- carboxylic acid
  MOD_RES (12)..(12): (S)-2-amino-3-(2-chlorophenyl)propanoic acid
  MOD_RES (13)..(13): (S)-2-amino-3-(benzo[b]thiophen-3-yl)propanoic acid
  C-term (S)-2-aminopropan-1-ol
XDXXDXAAFLXFXS

SEQ ID NO: 1457 - protein, 14 aa, Artificial Sequence
  Description of Artificial Sequence: Synthetic peptide
  N-term Acetic Acid
  MOD_RES (1)..(1): (R)-2-allylpyrrolidine-2-carboxylic acid
  MOD_RES (3)..(3): (S)-2-amino-4,4-dimethylpentanoic acid
  MOD_RES (4)..(4): 2-amino-2-(pent-4-en-1-yl)hept-6-enoic acid
  MOD_RES (6)..(6): (S)-3-(2-amino-2-carboxyethyl)benzoic acid
  MOD_RES (11)..(11): (S)-3-amino-1-((pent-4-en-1-yloxy)carbonyl)pyrrolidine-3- carboxylic acid
  MOD_RES (12)..(12): (S)-2-amino-3-(2-chlorophenyl)propanoic acid
  MOD_RES (13)..(13): (S)-2-amino-3-(benzo[b]thiophen-3-yl)propanoic acid
  C-term ethanamine
XDXXDXAAFLXFXS

SEQ ID NO: 1458 - protein, 14 aa, Artificial Sequence
  Description of Artificial Sequence: Synthetic peptide
  N-term Acetic Acid
  MOD_RES (1)..(1): (R)-2-allylpyrrolidine-2-carboxylic acid
  MOD_RES (3)..(3): (S)-2-amino-4,4-dimethylpentanoic acid
  MOD_RES (4)..(4): 2-amino-2-(pent-4-en-1-yl)hept-6-enoic acid
  MOD_RES (6)..(6): (S)-3-(2-amino-2-carboxyethyl)benzoic acid
  MOD_RES (7)..(7): N6-isopropyl-L-lysine
  MOD_RES (11)..(11): (S)-3-amino-1-((pent-4-en-1-yloxy)carbonyl)pyrrolidine-3- carboxylic acid
  MOD_RES (12)..(12): (S)-2-amino-3-(thiophen-3-yl)propanoic acid
  MOD_RES (13)..(13): (S)-2-amino-3-(benzo[b]thiophen-3-yl)propanoic acid
  C-term amino
XDXXDXKAFLXXXF

SEQ ID NO: 1459 - protein, 14 aa, Artificial Sequence
  Description of Artificial Sequence: Synthetic peptide
  N-term Acetic Acid
  MOD_RES (1)..(1): (R)-2-allylpyrrolidine-2-carboxylic acid
  MOD_RES (3)..(3): (S)-2-amino-4,4-dimethylpentanoic acid
  MOD_RES (4)..(4): 2-amino-2-(pent-4-en-1-yl)hept-6-enoic acid
  MOD_RES (6)..(6): (S)-3-(2-amino-2-carboxyethyl)benzoic acid
  MOD_RES (11)..(11): (S)-3-amino-1-((pent-4-en-1-yloxy)carbonyl)pyrrolidine-3- carboxylic acid
  MOD_RES (12)..(12): (S)-2-amino-3-(thiophen-3-yl)propanoic acid
  MOD_RES (13)..(13): (S)-2-amino-3-(benzo[b]thiophen-3-yl)propanoic acid
  C-term amino
XDXXDXHAFLXXXF

SEQ ID NO: 1460 - protein, 14 aa, Artificial Sequence
  Description of Artificial Sequence: Synthetic peptide
  N-term Acetic Acid
  MOD_RES (1)..(1): (R)-2-allylpyrrolidine-2-carboxylic acid
  MOD_RES (3)..(3): (S)-2-amino-4,4-dimethylpentanoic acid
  MOD_RES (4)..(4): 2-amino-2-(pent-4-en-1-yl)hept-6-enoic acid
  MOD_RES (6)..(6): (S)-3-(2-amino-2-carboxyethyl)benzoic acid
  MOD_RES (11)..(11): (S)-3-amino-1-((pent-4-en-1-yloxy)carbonyl)pyrrolidine-3- carboxylic acid
  MOD_RES (12)..(12): (S)-2-amino-3-(thiophen-3-yl)propanoic acid
  MOD_RES (13)..(13): (S)-2-amino-3-(benzo[b]thiophen-3-yl)propanoic acid
  C-term amino
XDXXDXKAFLXXXF

SEQ ID NO: 1461 - protein, 14 aa, Artificial Sequence
  Description of Artificial Sequence: Synthetic peptide
  N-term Acetic Acid
  MOD_RES (1)..(1): (R)-2-allylpyrrolidine-2-carboxylic acid
  MOD_RES (3)..(3): (S)-2-amino-4,4-dimethylpentanoic acid
  MOD_RES (4)..(4): 2-amino-2-(pent-4-en-1-yl)hept-6-enoic acid
  MOD_RES (6)..(6): (S)-3-(2-amino-2-carboxyethyl)benzoic acid
  MOD_RES (11)..(11): (S)-3-amino-1-((pent-4-en-1-yloxy)carbonyl)pyrrolidine-3- carboxylic acid
  MOD_RES (12)..(12): (S)-2-amino-3-(thiophen-3-yl)propanoic acid
  MOD_RES (13)..(13): (S)-2-amino-3-(benzo[b]thiophen-3-yl)propanoic acid
  C-term amino
XDXXDXQAFLXXXF

SEQ ID NO: 1462 - protein, 14 aa, Artificial Sequence
  Description of Artificial Sequence: Synthetic peptide
  N-term Acetic Acid
  MOD_RES (1)..(1): (R)-2-allylpyrrolidine-2-carboxylic acid
  MOD_RES (3)..(3): (S)-2-amino-4,4-dimethylpentanoic acid
  MOD_RES (4)..(4): 2-amino-2-(pent-4-en-1-yl)hept-6-enoic acid
  MOD_RES (6)..(6): (S)-3-(2-amino-2-carboxyethyl)benzoic acid
  MOD_RES (7)..(7): (S)-2-aminohexanoic acid
  MOD_RES (11)..(11): (S)-3-amino-1-((pent-4-en-1-yloxy)carbonyl)pyrrolidine-3- carboxylic acid
  MOD_RES (12)..(12): (S)-2-amino-3-(thiophen-3-yl)propanoic acid
  MOD_RES (13)..(13): (S)-2-amino-3-(benzo[b]thiophen-3-yl)propanoic acid
  C-term amino
XDXXDXXAFLXXXF

SEQ ID NO: 1463 - protein, 14 aa, Artificial Sequence
  Description of Artificial Sequence: Synthetic peptide
  N-term Acetic Acid
  MOD_RES (1)..(1): (R)-2-allylpyrrolidine-2-carboxylic acid
  MOD_RES (3)..(3): (S)-2-amino-4,4-dimethylpentanoic acid
  MOD_RES (4)..(4): 2-amino-2-(pent-4-en-1-yl)hept-6-enoic acid
  MOD_RES (6)..(6): (S)-3-(2-amino-2-carboxyethyl)benzoic acid
  MOD_RES (7)..(7): 2-amino-2-methylpropanoic acid
  MOD_RES (11)..(11): (S)-3-amino-1-((pent-4-en-1-yloxy)carbonyl)pyrrolidine-3- carboxylic acid
  MOD_RES (12)..(12): (S)-2-amino-3-(thiophen-3-yl)propanoic acid
  MOD_RES (13)..(13): (S)-2-amino-3-(benzo[b]thiophen-3-yl)propanoic acid
  C-term amino
XDXXDXXAFLXXXF

SEQ ID NO: 1464 - protein, 14 aa, Artificial Sequence
  Description of Artificial Sequence: Synthetic peptide
  N-term Acetic Acid
  MOD_RES (1)..(1): (R)-2-allylpyrrolidine-2-carboxylic acid
  MOD_RES (3)..(3): (S)-2-amino-4,4-dimethylpentanoic acid
  MOD_RES (4)..(4): 2-amino-2-(pent-4-en-1-yl)hept-6-enoic acid
  MOD_RES (6)..(6): (S)-3-(2-amino-2-carboxyethyl)benzoic acid
  MOD_RES (7)..(7): N6-isopropyl-L-lysine
  MOD_RES (11)..(11): (S)-3-amino-1-((pent-4-en-1-yloxy)carbonyl)pyrrolidine-3- carboxylic acid
  MOD_RES (12)..(12): (S)-2-amino-3-(thiophen-3-yl)propanoic acid
  MOD_RES (13)..(13): (S)-2-amino-3-(benzo[b]thiophen-3-yl)propanoic acid
  C-term amino
XDXXDXKAFLXXXA

SEQ ID NO: 1465 - protein, 14 aa, Artificial Sequence
  Description of Artificial Sequence: Synthetic peptide
  N-term Acetic Acid
  MOD_RES (1)..(1): (R)-2-allylpyrrolidine-2-carboxylic acid
  MOD_RES (3)..(3): (S)-2-amino-4,4-dimethylpentanoic acid
  MOD_RES (4)..(4): 2-amino-2-(pent-4-en-1-yl)hept-6-enoic acid
  MOD_RES (6)..(6): (S)-3-(2-amino-2-carboxyethyl)benzoic acid
  MOD_RES (11)..(11): (S)-3-amino-1-((pent-4-en-1-yloxy)carbonyl)pyrrolidine-3- carboxylic acid
  MOD_RES (12)..(12): (S)-2-amino-3-(thiophen-3-yl)propanoic acid
  MOD_RES (13)..(13): (S)-2-amino-3-(benzo[b]thiophen-3-yl)propanoic acid
  C-term amino
XDXXDXHAFLXXXA

SEQ ID NO: 1466 - protein, 14 aa, Artificial Sequence
  Description of Artificial Sequence: Synthetic peptide
  N-term Acetic Acid
  MOD_RES (1)..(1): (R)-2-allylpyrrolidine-2-carboxylic acid
  MOD_RES (3)..(3): (S)-2-amino-4,4-dimethylpentanoic acid
  MOD_RES (4)..(4): 2-amino-2-(pent-4-en-1-yl)hept-6-enoic acid
  MOD_RES (6)..(6): (S)-3-(2-amino-2-carboxyethyl)benzoic acid
  MOD_RES (11)..(11): (S)-3-amino-1-((pent-4-en-1-yloxy)carbonyl)pyrrolidine-3- carboxylic acid
  MOD_RES (12)..(12): (S)-2-amino-3-(thiophen-3-yl)propanoic acid
  MOD_RES (13)..(13): (S)-2-amino-3-(benzo[b]thiophen-3-yl)propanoic acid
  C-term amino
XDXXDXKAFLXXXA

SEQ ID NO: 1467 - protein, 14 aa, Artificial Sequence
  Description of Artificial Sequence: Synthetic peptide
  N-term Acetic Acid
  MOD_RES (1)..(1): (R)-2-allylpyrrolidine-2-carboxylic acid
  MOD_RES (3)..(3): (S)-2-amino-4,4-dimethylpentanoic acid
  MOD_RES (4)..(4): 2-amino-2-(pent-4-en-1-yl)hept-6-enoic acid
  MOD_RES (6)..(6): (S)-3-(2-amino-2-carboxyethyl)benzoic acid
  MOD_RES (11)..(11): (S)-3-amino-1-((pent-4-en-1-yloxy)carbonyl)pyrrolidine-3- carboxylic acid
  MOD_RES (12)..(12): (S)-2-amino-3-(thiophen-3-yl)propanoic acid
  MOD_RES (13)..(13): (S)-2-amino-3-(benzo[b]thiophen-3-yl)propanoic acid
  C-term amino
XDXXDXQAFLXXXA

SEQ ID NO: 1468 - protein, 14 aa, Artificial Sequence
  Description of Artificial Sequence: Synthetic peptide
  N-term Acetic Acid
  MOD_RES (1)..(1): (R)-2-allylpyrrolidine-2-carboxylic acid
  MOD_RES (3)..(3): (S)-2-amino-4,4-dimethylpentanoic acid
  MOD_RES (4)..(4): 2-amino-2-(pent-4-en-1-yl)hept-6-enoic acid
  MOD_RES (6)..(6): (S)-3-(2-amino-2-carboxyethyl)benzoic acid
  MOD_RES (7)..(7): (S)-2-aminohexanoic acid
  MOD_RES (11)..(11): (S)-3-amino-1-((pent-4-en-1-yloxy)carbonyl)pyrrolidine-3- carboxylic acid
  MOD_RES (12)..(12): (S)-2-amino-3-(thiophen-3-yl)propanoic acid
  MOD_RES (13)..(13): (S)-2-amino-3-(benzo[b]thiophen-3-yl)propanoic acid
  C-term amino
XDXXDXXAFLXXXA

SEQ ID NO: 1469 - protein, 14 aa, Artificial Sequence
  Description of Artificial Sequence: Synthetic peptide
  N-term Acetic Acid
  MOD_RES (1)..(1): (R)-2-allylpyrrolidine-2-carboxylic acid
  MOD_RES (3)..(3): (S)-2-amino-4,4-dimethylpentanoic acid
  MOD_RES (4)..(4): 2-amino-2-(pent-4-en-1-yl)hept-6-enoic acid
  MOD_RES (6)..(6): (S)-3-(2-amino-2-carboxyethyl)benzoic acid
  MOD_RES (7)..(7): 2-amino-2-methylpropanoic acid
  MOD_RES (11)..(11): (S)-3-amino-1-((pent-4-en-1-yloxy)carbonyl)pyrrolidine-3- carboxylic acid
  MOD_RES (12)..(12): (S)-2-amino-3-(thiophen-3-yl)propanoic acid
  MOD_RES (13)..(13): (S)-2-amino-3-(benzo[b]thiophen-3-yl)propanoic acid
  C-term amino
XDXXDXXAFLXXXA

SEQ ID NO: 1470 - protein, 14 aa, Artificial Sequence
  Description of Artificial Sequence: Synthetic peptide
  N-term Acetic Acid
  MOD_RES (1)..(1): (R)-2-allylpyrrolidine-2-carboxylic acid
  MOD_RES (3)..(3): (S)-2-amino-4,4-dimethylpentanoic acid
  MOD_RES (4)..(4): 2-amino-2-(pent-4-en-1-yl)hept-6-enoic acid
  MOD_RES (6)..(6): (S)-1-((S)-2-amino-2-carboxyethyl)piperidine-3-carboxylic acid
  MOD_RES (11)..(11): (S)-3-amino-1-((pent-4-en-1-yloxy)carbonyl)pyrrolidine-3- carboxylic acid
  MOD_RES (12)..(12): (S)-2-amino-3-(thiophen-3-yl)propanoic acid
  MOD_RES (13)..(13): (S)-2-amino-3-(benzo[b]thiophen-3-yl)propanoic acid
  C-term amino
XDXXDXAAFLXXXQ

SEQ ID NO: 1471 - protein, 14 aa, Artificial Sequence
  Description of Artificial Sequence: Synthetic peptide
  N-term Acetic Acid
  MOD_RES (1)..(1): (R)-2-allylpyrrolidine-2-carboxylic acid
  MOD_RES (3)..(3): (S)-2-amino-3-cyclohexylpropanoic acid
  MOD_RES (4)..(4): 2-amino-2-(pent-4-en-1-yl)hept-6-enoic acid
  MOD_RES (7)..(7): N6-isopropyl-L-lysine
  MOD_RES (10)..(10): L-homoserine
  MOD_RES (11)..(11): (S)-3-amino-1-((pent-4-en-1-yloxy)carbonyl)pyrrolidine-3- carboxylic acid
  MOD_RES (13)..(13): (S)-2-amino-3-(benzo[b]thiophen-3-yl)propanoic acid
  MOD_RES (14)..(14): L-homoserine
  C-term amino
XNXXDQKAFSXFXS

SEQ ID NO: 1472 - protein, 14 aa, Artificial Sequence
  Description of Artificial Sequence: Synthetic peptide
  N-term Acetic Acid
  MOD_RES (1)..(1): (R)-2-allylpyrrolidine-2-carboxylic acid
  MOD_RES (3)..(3): (S)-2-amino-3-cyclohexylpropanoic acid
  MOD_RES (4)..(4): 2-amino-2-(pent-4-en-1-yl)hept-6-enoic acid
  MOD_RES (7)..(7): N6-isopropyl-L-lysine
  MOD_RES (9)..(9): (S)-2-amino-3-(pyridin-3-yl)propanoic acid
  MOD_RES (11)..(11): (S)-3-amino-1-((pent-4-en-1-yloxy)carbonyl)pyrrolidine-3- carboxylic acid
  MOD_RES (13)..(13): (S)-2-amino-3-(benzo[b]thiophen-3-yl)propanoic acid
  MOD_RES (14)..(14): L-homoserine
  C-term amino
XNXXDQKAXNXFXS

SEQ ID NO: 1473 - protein, 14 aa, Artificial Sequence
  Description of Artificial Sequence: Synthetic peptide
  N-term Acetic Acid
  MOD_RES (1)..(1): (R)-2-allylpyrrolidine-2-carboxylic acid
  MOD_RES (3)..(3): (S)-2-amino-3-cyclohexylpropanoic acid
  MOD_RES (4)..(4): 2-amino-2-(pent-4-en-1-yl)hept-6-enoic acid
  MOD_RES (7)..(7): N6-isopropyl-L-lysine
  MOD_RES (9)..(9): (S)-2-amino-3-(3-chlorophenyl)propanoic acid
  MOD_RES (11)..(11): (S)-3-amino-1-((pent-4-en-1-yloxy)carbonyl)pyrrolidine-3- carboxylic acid
  MOD_RES (13)..(13): (S)-2-amino-3-(benzo[b]thiophen-3-yl)propanoic acid
  MOD_RES (14)..(14): L-homoserine
  C-term amino
XNXXDQKAFNXFXS

SEQ ID NO: 1474 - protein, 14 aa, Artificial Sequence
  Description of Artificial Sequence: Synthetic peptide
  N-term Acetic Acid
  MOD_RES (1)..(1): (R)-2-allylpyrrolidine-2-carboxylic acid
  MOD_RES (3)..(3): (S)-2-amino-3-cyclohexylpropanoic acid
  MOD_RES (4)..(4): 2-amino-2-(pent-4-en-1-yl)hept-6-enoic acid
  MOD_RES (7)..(7): N6-isopropyl-L-lysine
  MOD_RES (9)..(9): (S)-2-amino-3-(3-carbamoylphenyl)propanoic acid
  MOD_RES (11)..(11): (S)-3-amino-1-((pent-4-en-1-yloxy)carbonyl)pyrrolidine-3- carboxylic acid
  MOD_RES (13)..(13): (S)-2-amino-3-(benzo[b]thiophen-3-yl)propanoic acid
  MOD_RES (14)..(14): L-homoserine
  C-term amino
XNXXDQKAFNXFXS

SEQ ID NO: 1475 - protein, 14 aa, Artificial Sequence
  Description of Artificial Sequence: Synthetic peptide
  N-term Acetic Acid
  MOD_RES (1)..(1): (R)-2-allylpyrrolidine-2-carboxylic acid
  MOD_RES (3)..(3): (S)-2-amino-3-cyclohexylpropanoic acid
  MOD_RES (4)..(4): 2-amino-2-(pent-4-en-1-yl)hept-6-enoic acid
  MOD_RES (7)..(7): N6-isopropyl-L-lysine
  MOD_RES (9)..(9): (S)-2-amino-3-(3-methoxyphenyl)propanoic acid
  MOD_RES (11)..(11): (S)-3-amino-1-((pent-4-en-1-yloxy)carbonyl)pyrrolidine-3- carboxylic acid
  MOD_RES (13)..(13): (S)-2-amino-3-(benzo[b]thiophen-3-yl)propanoic acid
  MOD_RES (14)..(14): L-homoserine
  C-term amino
XNXXDQKAFNXFXS

SEQ ID NO: 1476 - protein, 14 aa, Artificial Sequence
  Description of Artificial Sequence: Synthetic peptide
  N-term Acetic Acid
  MOD_RES (1)..(1): (R)-2-allylpyrrolidine-2-carboxylic acid
  MOD_RES (3)..(3): (S)-2-amino-3-cyclohexylpropanoic acid
  MOD_RES (4)..(4): 2-amino-2-(pent-4-en-1-yl)hept-6-enoic acid
  MOD_RES (7)..(7): N6-isopropyl-L-lysine
  MOD_RES (11)..(11): (S)-3-amino-1-((pent-4-en-1-yloxy)carbonyl)pyrrolidine-3- carboxylic acid
  MOD_RES (12)..(12): (S)-2-amino-3-(pyridin-3-yl)propanoic acid
  MOD_RES (13)..(13): (S)-2-amino-3-(benzo[b]thiophen-3-yl)propanoic acid
  MOD_RES (14)..(14): L-homoserine
  C-term amino
XNXXDQKAFNXXXS

SEQ ID NO: 1477 - protein, 14 aa, Artificial Sequence
  Description of Artificial Sequence: Synthetic peptide
  N-term Acetic Acid
  MOD_RES (1)..(1): (R)-2-allylpyrrolidine-2-carboxylic acid
  MOD_RES (3)..(3): (S)-2-amino-3-cyclohexylpropanoic acid
  MOD_RES (4)..(4): 2-amino-2-(pent-4-en-1-yl)hept-6-enoic acid
  MOD_RES (7)..(7): N6-isopropyl-L-lysine
  MOD_RES (11)..(11): (S)-3-amino-1-((pent-4-en-1-yloxy)carbonyl)pyrrolidine-3- carboxylic acid
  MOD_RES (12)..(12): (S)-2-amino-3-(3-chlorophenyl)propanoic acid
  MOD_RES (13)..(13): (S)-2-amino-3-(benzo[b]thiophen-3-yl)propanoic acid
  MOD_RES (14)..(14): L-homoserine
  C-term amino
XNXXDQKAFNXFXS

SEQ ID NO: 1478 - protein, 14 aa, Artificial Sequence
  Description of Artificial Sequence: Synthetic peptide
  N-term Acetic Acid
  MOD_RES (1)..(1): (R)-2-allylpyrrolidine-2-carboxylic acid
  MOD_RES (3)..(3): (S)-2-amino-3-cyclohexylpropanoic acid
  MOD_RES (4)..(4): 2-amino-2-(pent-4-en-1-yl)hept-6-enoic acid
  MOD_RES (7)..(7): N6-isopropyl-L-lysine
  MOD_RES (11)..(11): (S)-3-amino-1-((pent-4-en-1-yloxy)carbonyl)pyrrolidine-3- carboxylic acid
  MOD_RES (12)..(12): (S)-2-amino-3-(3-carbamoylphenyl)propanoic acid
  MOD_RES (13)..(13): (S)-2-amino-3-(benzo[b]thiophen-3-yl)propanoic acid
  MOD_RES (14)..(14): L-homoserine
  C-term amino
XNXXDQKAFNXFXS

SEQ ID NO: 1479 - protein, 14 aa, Artificial Sequence
  Description of Artificial Sequence: Synthetic peptide
  N-term Acetic Acid
  MOD_RES (1)..(1): (R)-2-allylpyrrolidine-2-carboxylic acid
  MOD_RES (3)..(3): (S)-2-amino-3-cyclohexylpropanoic acid
  MOD_RES (4)..(4): 2-amino-2-(pent-4-en-1-yl)hept-6-enoic acid
  MOD_RES (7)..(7): N6-isopropyl-L-lysine
  MOD_RES (11)..(11): (S)-3-amino-1-((pent-4-en-1-yloxy)carbonyl)pyrrolidine-3- carboxylic acid
  MOD_RES (12)..(12): (S)-2-amino-3-(3-methoxyphenyl)propanoic acid
  MOD_RES (13)..(13): (S)-2-amino-3-(benzo[b]thiophen-3-yl)propanoic acid
  MOD_RES (14)..(14): L-homoserine
  C-term amino
XNXXDQKAFNXFXS

SEQ ID NO: 1480 - protein, 14 aa, Artificial Sequence
  Description of Artificial Sequence: Synthetic peptide
  N-term Acetic Acid
  MOD_RES (1)..(1): (R)-2-allylpyrrolidine-2-carboxylic acid
  MOD_RES (3)..(3): (S)-2-amino-3-cyclohexylpropanoic acid
  MOD_RES (4)..(4): 2-amino-2-(pent-4-en-1-yl)hept-6-enoic acid
  MOD_RES (7)..(7): N6-isopropyl-L-lysine
  MOD_RES (11)..(11): (S)-3-amino-1-((pent-4-en-1-yloxy)carbonyl)pyrrolidine-3- carboxylic acid
  MOD_RES (13)..(13): (S)-2-amino-3-(benzo[b]thiophen-3-yl)propanoic acid
  MOD_RES (14)..(14): L-homoserine
  C-term amino
XNXXDQKSFNXFXS

SEQ ID NO: 1481 - protein, 14 aa, Artificial Sequence
  Description of Artificial Sequence: Synthetic peptide
  N-term Acetic Acid
  MOD_RES (1)..(1): (R)-2-allylpyrrolidine-2-carboxylic acid
  MOD_RES (2)..(2): L-homoserine
  MOD_RES (3)..(3): (S)-2-amino-3-cyclohexylpropanoic acid
  MOD_RES (4)..(4): 2-amino-2-(pent-4-en-1-yl)hept-6-enoic acid
  MOD_RES (7)..(7): N6-isopropyl-L-lysine
  MOD_RES (11)..(11): (S)-3-amino-1-((pent-4-en-1-yloxy)carbonyl)pyrrolidine-3- carboxylic acid
  MOD_RES (13)..(13): (S)-2-amino-3-(benzo[b]thiophen-3-yl)propanoic acid
  MOD_RES (14)..(14): L-homoserine
  C-term amino
XSXXDQKAFNXFXS

SEQ ID NO: 1482 - protein, 14 aa, Artificial Sequence
  Description of Artificial Sequence: Synthetic peptide
  N-term Acetic Acid
  MOD_RES (1)..(1): (R)-2-allylpyrrolidine-2-carboxylic acid
  MOD_RES (3)..(3): (S)-2-amino-3-cyclohexylpropanoic acid
  MOD_RES (4)..(4): 2-amino-2-(pent-4-en-1-yl)hept-6-enoic acid
  MOD_RES (6)..(6): L-homoserine
  MOD_RES (7)..(7): N6-isopropyl-L-lysine
  MOD_RES (11)..(11): (S)-3-amino-1-((pent-4-en-1-yloxy)carbonyl)pyrrolidine-3- carboxylic acid
  MOD_RES (13)..(13): (S)-2-amino-3-(benzo[b]thiophen-3-yl)propanoic acid
  MOD_RES (14)..(14): L-homoserine
  C-term amino
XNXXDSKAFNXFXS

SEQ ID NO: 1483 - protein, 14 aa, Artificial Sequence
  Description of Artificial Sequence: Synthetic peptide
  N-term Acetic Acid
  MOD_RES (1)..(1): (R)-2-allylpyrrolidine-2-carboxylic acid
  MOD_RES (3)..(3): (S)-2-amino-4,4-dimethylpentanoic acid
  MOD_RES (4)..(4): 2-amino-2-(pent-4-en-1-yl)hept-6-enoic acid
  MOD_RES (6)..(6): (S)-2-amino-3-((carboxymethyl)(2,2,2-trifluoroethyl)amino) propanoic acid
  MOD_RES (10)..(10): (S)-2-amino-5-(5,6-dihydroimidazo[1,5-a]pyrazin-7(8H)-yl)-5- oxopentanoic acid
  MOD_RES (11)..(11): (S)-3-amino-1-((pent-4-en-1-yloxy)carbonyl)pyrrolidine-3- carboxylic acid
  MOD_RES (12)..(12): (S)-2-amino-3-(thiophen-3-yl)propanoic acid
  MOD_RES (13)..(13): (S)-2-amino-3-(benzo[b]thiophen-3-yl)propanoic acid
  C-term amino
XDXXDXAAFXXXXQ

SEQ ID NO: 1484 - protein, 14 aa, Artificial Sequence
  Description of Artificial Sequence: Synthetic peptide
  N-term Acetic Acid
  MOD_RES (1)..(1): (R)-2-allylpyrrolidine-2-carboxylic acid
  MOD_RES (3)..(3): (S)-2-amino-4,4-dimethylpentanoic acid
  MOD_RES (4)..(4): 2-amino-2-(pent-4-en-1-yl)hept-6-enoic acid
  MOD_RES (6)..(6): (S)-2-amino-3-((carboxymethyl)(2,2,2-trifluoroethyl)amino) propanoic acid
  MOD_RES (10)..(10): (S)-2-amino-5-oxo-5-(4-(2,2,2-trifluoroethyl)piperazin-1-yl) pentanoic acid
  MOD_RES (11)..(11): (S)-3-amino-1-((pent-4-en-1-yloxy)carbonyl)pyrrolidine-3- carboxylic acid
  MOD_RES (12)..(12): (S)-2-amino-3-(thiophen-3-yl)propanoic acid
  MOD_RES (13)..(13): (S)-2-amino-3-(benzo[b]thiophen-3-yl)propanoic acid
  C-term amino
XDXXDXAAFXXXXQ

SEQ ID NO: 1485 - protein, 14 aa, Artificial Sequence
  Description of Artificial Sequence: Synthetic peptide
  N-term Acetic Acid
  MOD_RES (1)..(1): (R)-2-allylpyrrolidine-2-carboxylic acid
  MOD_RES (3)..(3): (S)-2-amino-4,4-dimethylpentanoic acid
  MOD_RES (4)..(4): 2-amino-2-(pent-4-en-1-yl)hept-6-enoic acid
  MOD_RES (6)..(6): (S)-2-amino-3-((carboxymethyl)(2,2,2-trifluoroethyl)amino) propanoic acid
  MOD_RES (10)..(10): (S)-2-amino-5-(4-(3-(dimethylamino)propyl)piperazin-1-yl)-5- oxopentanoic acid
  MOD_RES (11)..(11): (S)-3-amino-1-((pent-4-en-1-yloxy)carbonyl)pyrrolidine-3- carboxylic acid
  MOD_RES (12)..(12): (S)-2-amino-3-(thiophen-3-yl)propanoic acid
  MOD_RES (13)..(13): (S)-2-amino-3-(benzo[b]thiophen-3-yl)propanoic acid
  C-term amino
XDXXDXAAFXXXXQ

SEQ ID NO: 1486 - protein, 14 aa, Artificial Sequence
  Description of Artificial Sequence: Synthetic peptide
  N-term Acetic Acid
  MOD_RES (1)..(1): (R)-2-allylpyrrolidine-2-carboxylic acid
  MOD_RES (3)..(3): (S)-2-amino-4,4-dimethylpentanoic acid
  MOD_RES (4)..(4): 2-amino-2-(pent-4-en-1-yl)hept-6-enoic acid
  MOD_RES (6)..(6): (S)-2-amino-3-((carboxymethyl)(2,2,2-trifluoroethyl)amino) propanoic acid
  MOD_RES (10)..(10): (S)-2-amino-5-(4-(4-methylpiperazin-1-yl)piperidin-1-yl)-5- oxopentanoic acid
  MOD_RES (11)..(11): (S)-3-amino-1-((pent-4-en-1-yloxy)carbonyl)pyrrolidine-3- carboxylic acid
  MOD_RES (12)..(12): (S)-2-amino-3-(thiophen-3-yl)propanoic acid
  MOD_RES (13)..(13): (S)-2-amino-3-(benzo[b]thiophen-3-yl)propanoic acid
  C-term amino
XDXXDXAAFXXXXQ

SEQ ID NO: 1487 - protein, 14 aa, Artificial Sequence
  Description of Artificial Sequence: Synthetic peptide
  N-term Acetic Acid
  MOD_RES (1)..(1): (R)-2-allylpyrrolidine-2-carboxylic acid
  MOD_RES (3)..(3): (S)-2-amino-4,4-dimethylpentanoic acid
  MOD_RES (4)..(4): 2-amino-2-(pent-4-en-1-yl)hept-6-enoic acid
  MOD_RES (6)..(6): (S)-2-amino-3-((carboxymethyl)(2,2,2-trifluoroethyl)amino) propanoic acid
  MOD_RES (10)..(10): (S)-2-amino-5-oxo-5-(4-(pyridin-4-yl)piperazin-1-yl)pentanoic acid
  MOD_RES (11)..(11): (S)-3-amino-1-((pent-4-en-1-yloxy)carbonyl)pyrrolidine-3- carboxylic acid
  MOD_RES (12)..(12): (S)-2-amino-3-(thiophen-3-yl)propanoic acid
  MOD_RES (13)..(13): (S)-2-amino-3-(benzo[b]thiophen-3-yl)propanoic acid
  C-term amino
XDXXDXAAFXXXXQ

SEQ ID NO: 1488 - protein, 14 aa, Artificial Sequence
  Description of Artificial Sequence: Synthetic peptide
  N-term Acetic Acid
  MOD_RES (1)..(1): (R)-2-allylpyrrolidine-2-carboxylic acid
  MOD_RES (3)..(3): (S)-2-amino-4,4-dimethylpentanoic acid
  MOD_RES (4)..(4): 2-amino-2-(pent-4-en-1-yl)hept-6-enoic acid
  MOD_RES (6)..(6): (S)-2-amino-3-((carboxymethyl)(2,2,2-trifluoroethyl)amino) propanoic acid
  MOD_RES (10)..(10): (S)-2-amino-5-((R)-3-(dimethylamino)pyrrolidin-1-yl)-5- oxopentanoic acid
  MOD_RES (11)..(11): (S)-3-amino-1-((pent-4-en-1-yloxy)carbonyl)pyrrolidine-3- carboxylic acid
  MOD_RES (12)..(12): (S)-2-amino-3-(thiophen-3-yl)propanoic acid
  MOD_RES (13)..(13): (S)-2-amino-3-(benzo[b]thiophen-3-yl)propanoic acid
  C-term amino
XDXXDXAAFXXXXQ

SEQ ID NO: 1489 - protein, 14 aa, Artificial Sequence
  Description of Artificial Sequence: Synthetic peptide
  N-term Acetic Acid
  MOD_RES (1)..(1): (R)-2-allylpyrrolidine-2-carboxylic acid
  MOD_RES (3)..(3): (S)-2-amino-4,4-dimethylpentanoic acid
  MOD_RES (4)..(4): 2-amino-2-(pent-4-en-1-yl)hept-6-enoic acid
  MOD_RES (6)..(6): (S)-2-amino-3-((carboxymethyl)(2,2,2-trifluoroethyl)amino) propanoic acid
  MOD_RES (10)..(10): (S)-5-([1,4'-bipiperidin]-1'-yl)-2-amino-5-oxopentanoic acid
  MOD_RES (11)..(11): (S)-3-amino-1-((pent-4-en-1-yloxy)carbonyl)pyrrolidine-3- carboxylic acid
  MOD_RES (12)..(12): (S)-2-amino-3-(thiophen-3-yl)propanoic acid
  MOD_RES (13)..(13): (S)-2-amino-3-(benzo[b]thiophen-3-yl)propanoic acid
  C-term amino
XDXXDXAAFXXXXQ

SEQ ID NO: 1490 - protein, 14 aa, Artificial Sequence
  Description of Artificial Sequence: Synthetic peptide
  N-term Acetic Acid
  MOD_RES (1)..(1): (R)-2-allylpyrrolidine-2-carboxylic acid
  MOD_RES (3)..(3): (S)-2-amino-4,4-dimethylpentanoic acid
  MOD_RES (4)..(4): 2-amino-2-(pent-4-en-1-yl)hept-6-enoic acid
  MOD_RES (6)..(6): (S)-2-amino-3-((carboxymethyl)(2,2,2-trifluoroethyl)amino) propanoic acid
  MOD_RES (10)..(10): (S)-2-amino-5-oxo-5-(piperazin-1-yl)pentanoic acid
  MOD_RES (11)..(11): (S)-3-amino-1-((pent-4-en-1-yloxy)carbonyl)pyrrolidine-3- carboxylic acid
  MOD_RES (12)..(12): (S)-2-amino-3-(thiophen-3-yl)propanoic acid
  MOD_RES (13)..(13): (S)-2-amino-3-(benzo[b]thiophen-3-yl)propanoic acid
  C-term amino
XDXXDXAAFXXXXQ

SEQ ID NO: 1491 - protein, 14 aa, Artificial Sequence
  Description of Artificial Sequence: Synthetic peptide
  N-term Acetic Acid
  MOD_RES (1)..(1): (R)-2-allylpyrrolidine-2-carboxylic acid
  MOD_RES (3)..(3): (S)-2-amino-4,4-dimethylpentanoic acid
  MOD_RES (4)..(4): 2-amino-2-(pent-4-en-1-yl)hept-6-enoic acid
  MOD_RES (6)..(6): (S)-2-amino-3-((carboxymethyl)(2,2,2-trifluoroethyl)amino) propanoic acid
  MOD_RES (10)..(10): N5-benzyl-L-glutamine
  MOD_RES (11)..(11): (S)-3-amino-1-((pent-4-en-1-yloxy)carbonyl)pyrrolidine-3- carboxylic acid
  MOD_RES (12)..(12): (S)-2-amino-3-(thiophen-3-yl)propanoic acid
  MOD_RES (13)..(13): (S)-2-amino-3-(benzo[b]thiophen-3-yl)propanoic acid
  C-term amino
XDXXDXAAFQXXXQ

SEQ ID NO: 1492 - protein, 14 aa, Artificial Sequence
  Description of Artificial Sequence: Synthetic peptide
  N-term Acetic Acid
  MOD_RES (1)..(1): (R)-2-allylpyrrolidine-2-carboxylic acid
  MOD_RES (3)..(3): (S)-2-amino-4,4-dimethylpentanoic acid
  MOD_RES (4)..(4): 2-amino-2-(pent-4-en-1-yl)hept-6-enoic acid
  MOD_RES (6)..(6): (S)-2-amino-3-((carboxymethyl)(2,2,2-trifluoroethyl)amino) propanoic acid
  MOD_RES (10)..(10): (S)-2-amino-5-morpholino-5-oxopentanoic acid
  MOD_RES (11)..(11): (S)-3-amino-1-((pent-4-en-1-yloxy)carbonyl)pyrrolidine-3- carboxylic acid
  MOD_RES (12)..(12): (S)-2-amino-3-(thiophen-3-yl)propanoic acid
  MOD_RES (13)..(13): (S)-2-amino-3-(benzo[b]thiophen-3-yl)propanoic acid
  C-term amino
XDXXDXAAFXXXXQ

SEQ ID NO: 1493 - protein, 14 aa, Artificial Sequence
  Description of Artificial Sequence: Synthetic peptide
  N-term Acetic Acid
  MOD_RES (1)..(1): (R)-2-allylpyrrolidine-2-carboxylic acid
  MOD_RES (3)..(3): (S)-2-amino-4,4-dimethylpentanoic acid
  MOD_RES (4)..(4): 2-amino-2-(pent-4-en-1-yl)hept-6-enoic acid
  MOD_RES (5)..(5): (S)-2-amino-4-mercapto-4-oxobutanoic acid
  MOD_RES (11)..(11): (S)-3-amino-1-((pent-4-en-1-yloxy)carbonyl)pyrrolidine-3- carboxylic acid
  MOD_RES (12)..(12): (S)-2-amino-3-(thiophen-3-yl)propanoic acid
  MOD_RES (13)..(13): (S)-2-amino-3-(benzo[b]thiophen-3-yl)propanoic acid
  C-term amino
XDXXXDAAFLXXXQ

SEQ ID NO: 1494 - protein, 14 aa, Artificial Sequence
  Description of Artificial Sequence: Synthetic peptide
  N-term Acetic Acid
  MOD_RES (1)..(1): (R)-2-allylpyrrolidine-2-carboxylic acid
  MOD_RES (3)..(3): (S)-2-amino-4,4-dimethylpentanoic acid
  MOD_RES (4)..(4): 2-amino-2-(pent-4-en-1-yl)hept-6-enoic acid
  MOD_RES (6)..(6): (S)-2-amino-4-mercapto-4-oxobutanoic acid
  MOD_RES (11)..(11): (S)-3-amino-1-((pent-4-en-1-yloxy)carbonyl)pyrrolidine-3- carboxylic acid
  MOD_RES (12)..(12): (S)-2-amino-3-(thiophen-3-yl)propanoic acid
  MOD_RES (13)..(13): (S)-2-amino-3-(benzo[b]thiophen-3-yl)propanoic acid
  C-term amino
XDXXDXAAFLXXXQ

SEQ ID NO: 1495 - protein, 14 aa, Artificial Sequence
  Description of Artificial Sequence: Synthetic peptide
  N-term Acetic Acid
  MOD_RES (1)..(1): (R)-2-allylpyrrolidine-2-carboxylic acid
  MOD_RES (3)..(3): (S)-2-amino-4,4-dimethylpentanoic acid
  MOD_RES (4)..(4): 2-amino-2-(pent-4-en-1-yl)hept-6-enoic acid
  MOD_RES (6)..(6): (S)-2-amino-5-mercapto-5-oxopentanoic acid
  MOD_RES (11)..(11): (S)-3-amino-1-((pent-4-en-1-yloxy)carbonyl)pyrrolidine-3- carboxylic acid
  MOD_RES (12)..(12): (S)-2-amino-3-(thiophen-3-yl)propanoic acid
  MOD_RES (13)..(13): (S)-2-amino-3-(benzo[b]thiophen-3-yl)propanoic acid
  C-term amino
XDXXDXAAFLXXXQ

SEQ ID NO: 1496 - protein, 14 aa, Artificial Sequence
  Description of Artificial Sequence: Synthetic peptide
  N-term Acetic Acid
  MOD_RES (1)..(1): (R)-2-allylpyrrolidine-2-carboxylic acid
  MOD_RES (3)..(3): (S)-2-amino-4,4-dimethylpentanoic acid
  MOD_RES (4)..(4): 2-amino-2-(pent-4-en-1-yl)hept-6-enoic acid
  MOD_RES (5)..(5): (S)-2-amino-4-oxo-4-(2-(pyridin-2-yldisulfaneyl)ethoxy) butanoic acid
  MOD_RES (11)..(11): (S)-3-amino-1-((pent-4-en-1-yloxy)carbonyl)pyrrolidine-3- carboxylic acid
  MOD_RES (12)..(12): (S)-2-amino-3-(thiophen-3-yl)propanoic acid
  MOD_RES (13)..(13): (S)-2-amino-3-(benzo[b]thiophen-3-yl)propanoic acid
  C-term amino
XDXXXDAAFLXXXQ

SEQ ID NO: 1497 - protein, 14 aa, Artificial Sequence
  Description of Artificial Sequence: Synthetic peptide
  N-term Acetic Acid
  MOD_RES (1)..(1): (R)-2-allylpyrrolidine-2-carboxylic acid
  MOD_RES (3)..(3): (S)-2-amino-4,4-dimethylpentanoic acid
  MOD_RES (4)..(4): 2-amino-2-(pent-4-en-1-yl)hept-6-enoic acid
  MOD_RES (6)..(6): (S)-2-amino-5-oxo-5-(2-(pyridin-2-yldisulfaneyl)ethoxy) pentanoic acid
  MOD_RES (11)..(11): (S)-3-amino-1-((pent-4-en-1-yloxy)carbonyl)pyrrolidine-3- carboxylic acid
  MOD_RES (12)..(12): (S)-2-amino-3-(thiophen-3-yl)propanoic acid
  MOD_RES (13)..(13): (S)-2-amino-3-(benzo[b]thiophen-3-yl)propanoic acid
  C-term amino
XDXXDXAAFLXXXQ

SEQ ID NO: 1498 - protein, 14 aa, Artificial Sequence
  Description of Artificial Sequence: Synthetic peptide
  N-term Acetic Acid
  MOD_RES (1)..(1): (R)-2-allylpyrrolidine-2-carboxylic acid
  MOD_RES (2)..(2): (S)-2-amino-4-oxo-4-(2-(phenyldisulfaneyl)ethoxy)butanoic acid
  MOD_RES (3)..(3): (S)-2-amino-4,4-dimethylpentanoic acid
  MOD_RES (4)..(4): 2-amino-2-(pent-4-en-1-yl)hept-6-enoic acid
  MOD_RES (11)..(11): (S)-3-amino-1-((pent-4-en-1-yloxy)carbonyl)pyrrolidine-3- carboxylic acid
  MOD_RES (12)..(12): (S)-2-amino-3-(thiophen-3-yl)propanoic acid
  MOD_RES (13)..(13): (S)-2-amino-3-(benzo[b]thiophen-3-yl)propanoic acid
  C-term amino
XXXXDDAAFLXXXQ

SEQ ID NO: 1499 - protein, 14 aa, Artificial Sequence
  Description of Artificial Sequence: Synthetic peptide
  N-term Acetic Acid
  MOD_RES (1)..(1): (R)-2-allylpyrrolidine-2-carboxylic acid
  MOD_RES (3)..(3): (S)-2-amino-4,4-dimethylpentanoic acid
  MOD_RES (4)..(4): 2-amino-2-(pent-4-en-1-yl)hept-6-enoic acid
  MOD_RES (5)..(5): (S)-2-amino-4-oxo-4-(2-(phenyldisulfaneyl)ethoxy)butanoic acid
  MOD_RES (11)..(11): (S)-3-amino-1-((pent-4-en-1-yloxy)carbonyl)pyrrolidine-3- carboxylic acid
  MOD_RES (12)..(12): (S)-2-amino-3-(thiophen-3-yl)propanoic acid
  MOD_RES (13)..(13): (S)-2-amino-3-(benzo[b]thiophen-3-yl)propanoic acid
  C-term amino
XDXXXDAAFLXXXQ

SEQ ID NO: 1500 - protein, 14 aa, Artificial Sequence
  Description of Artificial Sequence: Synthetic peptide
  N-term Acetic Acid
  MOD_RES (1)..(1): (R)-2-allylpyrrolidine-2-carboxylic acid
  MOD_RES (3)..(3): (S)-2-amino-4,4-dimethylpentanoic acid
  MOD_RES (4)..(4): 2-amino-2-(pent-4-en-1-yl)hept-6-enoic acid
  MOD_RES (6)..(6): (S)-2-amino-4-oxo-4-(2-(phenyldisulfaneyl)ethoxy)butanoic acid
  MOD_RES (11)..(11): (S)-3-amino-1-((pent-4-en-1-yloxy)carbonyl)pyrrolidine-3- carboxylic acid
  MOD_RES (12)..(12): (S)-2-amino-3-(thiophen-3-yl)propanoic acid
  MOD_RES (13)..(13): (S)-2-amino-3-(benzo[b]thiophen-3-yl)propanoic acid
  C-term amino
XDXXDXAAFLXXXQ

SEQ ID NO: 1501 - protein, 14 aa, Artificial Sequence
  Description of Artificial Sequence: Synthetic peptide
  N-term Acetic Acid
  MOD_RES (1)..(1): (R)-2-allylpyrrolidine-2-carboxylic acid
  MOD_RES (3)..(3): (S)-2-amino-4,4-dimethylpentanoic acid
  MOD_RES (4)..(4): 2-amino-2-(pent-4-en-1-yl)hept-6-enoic acid
  MOD_RES (6)..(6): (S)-2-amino-5-oxo-5-(2-(phenyldisulfaneyl)ethoxy)pentanoic acid
  MOD_RES (11)..(11): (S)-3-amino-1-((pent-4-en-1-yloxy)carbonyl)pyrrolidine-3- carboxylic acid
  MOD_RES (12)..(12): (S)-2-amino-3-(thiophen-3-yl)propanoic acid
  MOD_RES (13)..(13): (S)-2-amino-3-(benzo[b]thiophen-3-yl)propanoic acid
  C-term amino
XDXXDXAAFLXXXQ

SEQ ID NO: 1502 - protein, 14 aa, Artificial Sequence
  Description of Artificial Sequence: Synthetic peptide
  N-term Acetic Acid
  MOD_RES (1)..(1): (R)-2-allylpyrrolidine-2-carboxylic acid
  MOD_RES (2)..(2): (S)-2-amino-4-(2-(hexyldisulfaneyl)ethoxy)-4-oxobutanoic acid
  MOD_RES (3)..(3): (S)-2-amino-4,4-dimethylpentanoic acid
  MOD_RES (4)..(4): 2-amino-2-(pent-4-en-1-yl)hept-6-enoic acid
  MOD_RES (11)..(11): (S)-3-amino-1-((pent-4-en-1-yloxy)carbonyl)pyrrolidine-3- carboxylic acid
  MOD_RES (12)..(12): (S)-2-amino-3-(thiophen-3-yl)propanoic acid
  MOD_RES (13)..(13): (S)-2-amino-3-(benzo[b]thiophen-3-yl)propanoic acid
  C-term amino
XXXXDDAAFLXXXQ

SEQ ID NO: 1503 - protein, 14 aa, Artificial Sequence
  Description of Artificial Sequence: Synthetic peptide
  N-term Acetic Acid
  MOD_RES (1)..(1): (R)-2-allylpyrrolidine-2-carboxylic acid
  MOD_RES (3)..(3): (S)-2-amino-4,4-dimethylpentanoic acid
  MOD_RES (4)..(4): 2-amino-2-(pent-4-en-1-yl)hept-6-enoic acid
  MOD_RES (5)..(5): (S)-2-amino-4-(2-(hexyldisulfaneyl)ethoxy)-4-oxobutanoic acid
  MOD_RES (11)..(11): (S)-3-amino-1-((pent-4-en-1-yloxy)carbonyl)pyrrolidine-3- carboxylic acid
  MOD_RES (12)..(12): (S)-2-amino-3-(thiophen-3-yl)propanoic acid
  MOD_RES (13)..(13): (S)-2-amino-3-(benzo[b]thiophen-3-yl)propanoic acid
  C-term amino
XDXXXDAAFLXXXQ

SEQ ID NO: 1504 - protein, 14 aa, Artificial Sequence
  Description of Artificial Sequence: Synthetic peptide
  N-term Acetic Acid
  MOD_RES (1)..(1): (R)-2-allylpyrrolidine-2-carboxylic acid
  MOD_RES (3)..(3): (S)-2-amino-4,4-dimethylpentanoic acid
  MOD_RES (4)..(4): 2-amino-2-(pent-4-en-1-yl)hept-6-enoic acid
  MOD_RES (6)..(6): (S)-2-amino-4-(2-(hexyldisulfaneyl)ethoxy)-4-oxobutanoic acid
  MOD_RES (11)..(11): (S)-3-amino-1-((pent-4-en-1-yloxy)carbonyl)pyrrolidine-3- carboxylic acid
  MOD_RES (12)..(12): (S)-2-amino-3-(thiophen-3-yl)propanoic acid
  MOD_RES (13)..(13): (S)-2-amino-3-(benzo[b]thiophen-3-yl)propanoic acid
  C-term amino
XDXXDXAAFLXXXQ

SEQ ID NO: 1505 - protein, 14 aa, Artificial Sequence
  Description of Artificial Sequence: Synthetic peptide
  N-term Acetic Acid
  MOD_RES (1)..(1): (R)-2-allylpyrrolidine-2-carboxylic acid
  MOD_RES (2)..(2): (S)-2-amino-4-(2-(ethyldisulfaneyl)ethoxy)-4-oxobutanoic acid
  MOD_RES (3)..(3): (S)-2-amino-4,4-dimethylpentanoic acid
  MOD_RES (4)..(4): 2-amino-2-(pent-4-en-1-yl)hept-6-enoic acid
  MOD_RES (11)..(11): (S)-3-amino-1-((pent-4-en-1-yloxy)carbonyl)pyrrolidine-3- carboxylic acid
  MOD_RES (12)..(12): (S)-2-amino-3-(thiophen-3-yl)propanoic acid
  MOD_RES (13)..(13): (S)-2-amino-3-(benzo[b]thiophen-3-yl)propanoic acid
  C-term amino
XXXXDDAAFLXXXQ

SEQ ID NO: 1506 - protein, 14 aa, Artificial Sequence
  Description of Artificial Sequence: Synthetic peptide
  N-term Acetic Acid
  MOD_RES (1)..(1): (R)-2-allylpyrrolidine-2-carboxylic acid
  MOD_RES (3)..(3): (S)-2-amino-4,4-dimethylpentanoic acid
  MOD_RES (4)..(4): 2-amino-2-(pent-4-en-1-yl)hept-6-enoic acid
  MOD_RES (5)..(5): (S)-2-amino-4-(2-(ethyldisulfaneyl)ethoxy)-4-oxobutanoic acid
  MOD_RES (11)..(11): (S)-3-amino-1-((pent-4-en-1-yloxy)carbonyl)pyrrolidine-3- carboxylic acid
  MOD_RES (12)..(12): (S)-2-amino-3-(thiophen-3-yl)propanoic acid
  MOD_RES (13)..(13): (S)-2-amino-3-(benzo[b]thiophen-3-yl)propanoic acid
  C-term amino
XDXXXDAAFLXXXQ

SEQ ID NO: 1507 - protein, 14 aa, Artificial Sequence
  Description of Artificial Sequence: Synthetic peptide
  N-term Acetic Acid
  MOD_RES (1)..(1): (R)-2-allylpyrrolidine-2-carboxylic acid
  MOD_RES (3)..(3): (S)-2-amino-4,4-dimethylpentanoic acid
  MOD_RES (4)..(4): 2-amino-2-(pent-4-en-1-yl)hept-6-enoic acid
  MOD_RES (6)..(6): (S)-2-amino-4-(2-(ethyldisulfaneyl)ethoxy)-4-oxobutanoic acid
  MOD_RES (11)..(11): (S)-3-amino-1-((pent-4-en-1-yloxy)carbonyl)pyrrolidine-3- carboxylic acid
  MOD_RES (12)..(12): (S)-2-amino-3-(thiophen-3-yl)propanoic acid
  MOD_RES (13)..(13): (S)-2-amino-3-(benzo[b]thiophen-3-yl)propanoic acid
  C-term amino
XDXXDXAAFLXXXQ

SEQ ID NO: 1508 - protein, 14 aa, Artificial Sequence
  Description of Artificial Sequence: Synthetic peptide
  N-term Acetic Acid
  MOD_RES (1)..(1): (R)-2-allylpyrrolidine-2-carboxylic acid
  MOD_RES (3)..(3): (S)-2-amino-4,4-dimethylpentanoic acid
  MOD_RES (4)..(4): 2-amino-2-(pent-4-en-1-yl)hept-6-enoic acid
  MOD_RES (6)..(6): (S)-2-amino-5-(2-(ethyldisulfaneyl)ethoxy)-5-oxopentanoic acid
  MOD_RES (11)..(11): (S)-3-amino-1-((pent-4-en-1-yloxy)carbonyl)pyrrolidine-3- carboxylic acid
  MOD_RES (12)..(12): (S)-2-amino-3-(thiophen-3-yl)propanoic acid
  MOD_RES (13)..(13): (S)-2-amino-3-(benzo[b]thiophen-3-yl)propanoic acid
  C-term amino
XDXXDXAAFLXXXQ

SEQ ID NO: 1509 - protein, 14 aa, Artificial Sequence
  Description of Artificial Sequence: Synthetic peptide
  N-term Acetic Acid
  MOD_RES (1)..(1): (R)-2-allylpyrrolidine-2-carboxylic acid
  MOD_RES (3)..(3): (S)-2-amino-4,4-dimethylpentanoic acid
  MOD_RES (4)..(4): 2-amino-2-(pent-4-en-1-yl)hept-6-enoic acid
  MOD_RES (6)..(6): (R)-1-((S)-2-amino-2-carboxyethyl)piperidine-3-carboxylic acid
  MOD_RES (11)..(11): (S)-3-amino-1-((pent-4-en-1-yloxy)carbonyl)pyrrolidine-3- carboxylic acid
  MOD_RES (12)..(12): (S)-2-amino-3-(thiophen-3-yl)propanoic acid
  MOD_RES (13)..(13): (S)-2-amino-3-(benzo[b]thiophen-3-yl)propanoic acid
  C-term amino
XDXXDXAAFLXXXQ

SEQ ID NO: 1510 - protein, 14 aa, Artificial Sequence
  Description of Artificial Sequence: Synthetic peptide
  N-term Acetic Acid
  MOD_RES (1)..(1): (R)-2-allylpyrrolidine-2-carboxylic acid
  MOD_RES (3)..(3): (S)-2-amino-4,4-dimethylpentanoic acid
  MOD_RES (4)..(4): 2-amino-2-(pent-4-en-1-yl)hept-6-enoic acid
  MOD_RES (6)..(6): (S)-1-((S)-2-amino-2-carboxyethyl)piperidine-2-carboxylic acid
  MOD_RES (11)..(11): (S)-3-amino-1-((pent-4-en-1-yloxy)carbonyl)pyrrolidine-3- carboxylic acid
  MOD_RES (12)..(12): (S)-2-amino-3-(thiophen-3-yl)propanoic acid
  MOD_RES (13)..(13): (S)-2-amino-3-(benzo[b]thiophen-3-yl)propanoic acid
  C-term amino
XDXXDXAAFLXXXQ

SEQ ID NO: 1511 - protein, 14 aa, Artificial Sequence
  Description of Artificial Sequence: Synthetic peptide
  N-term Acetic Acid
  MOD_RES (1)..(1): (R)-2-allylpyrrolidine-2-carboxylic acid
  MOD_RES (3)..(3): (S)-2-amino-4,4-dimethylpentanoic acid
  MOD_RES (4)..(4): 2-amino-2-(pent-4-en-1-yl)hept-6-enoic acid
  MOD_RES (6)..(6): (R)-1-((S)-2-amino-2-carboxyethyl)piperidine-2-carboxylic acid
  MOD_RES (11)..(11): (S)-3-amino-1-((pent-4-en-1-yloxy)carbonyl)pyrrolidine-3- carboxylic acid
  MOD_RES (12)..(12): (S)-2-amino-3-(thiophen-3-yl)propanoic acid
  MOD_RES (13)..(13): (S)-2-amino-3-(benzo[b]thiophen-3-yl)propanoic acid
  C-term amino
XDXXDXAAFLXXXQ

SEQ ID NO: 1512 - protein, 14 aa, Artificial Sequence
  Description of Artificial Sequence: Synthetic peptide
  N-term Acetic Acid
  MOD_RES (1)..(1): (R)-2-allylpyrrolidine-2-carboxylic acid
  MOD_RES (3)..(3): (S)-2-amino-4,4-dimethylpentanoic acid
  MOD_RES (4)..(4): 2-amino-2-(but-3-en-1-yl)hex-5-enoic acid
  MOD_RES (11)..(11): (S)-3-amino-1-((but-3-en-1-yloxy)carbonyl)pyrrolidine-3- carboxylic acid
  MOD_RES (12)..(12): (S)-2-amino-3-(thiophen-3-yl)propanoic acid
  MOD_RES (13)..(13): (S)-2-amino-3-(benzo[b]thiophen-3-yl)propanoic acid
  C-term amino
XDXXDDAAFLXXXQ

SEQ ID NO: 1513 - protein, 14 aa, Artificial Sequence
  Description of Artificial Sequence: Synthetic peptide
  N-term Acetic Acid
  MOD_RES (1)..(1): (R)-2-allylpyrrolidine-2-carboxylic acid
  MOD_RES (3)..(3): (S)-2-amino-4,4-dimethylpentanoic acid
  MOD_RES (4)..(4): 2-amino-2-(but-3-en-1-yl)hex-5-enoic acid
  MOD_RES (11)..(11): (S)-3-amino-1-((pent-4-en-1-yloxy)carbonyl)pyrrolidine-3- carboxylic acid
  MOD_RES (12)..(12): (S)-2-amino-3-(thiophen-3-yl)propanoic acid
  MOD_RES (13)..(13): (S)-2-amino-3-(benzo[b]thiophen-3-yl)propanoic acid
  C-term amino
XDXXDDAAFLXXXQ

SEQ ID NO: 1514 - protein, 14 aa, Artificial Sequence
  Description of Artificial Sequence: Synthetic peptide
  N-term Acetic Acid
  MOD_RES (1)..(1): (R)-2-allylpyrrolidine-2-carboxylic acid
  MOD_RES (3)..(3): (S)-2-amino-4,4-dimethylpentanoic acid
  MOD_RES (4)..(4): 2-amino-2-(but-3-en-1-yl)hex-5-enoic acid
  MOD_RES (11)..(11): (S)-3-amino-1-((hex-5-en-1-yloxy)carbonyl)pyrrolidine-3- carboxylic acid
  MOD_RES (12)..(12): (S)-2-amino-3-(thiophen-3-yl)propanoic acid
  MOD_RES (13)..(13): (S)-2-amino-3-(benzo[b]thiophen-3-yl)propanoic acid
  C-term amino
XDXXDDAAFLXXXQ

SEQ ID NO: 1515 - protein, 14 aa, Artificial Sequence
  Description of Artificial Sequence: Synthetic peptide
  N-term Acetic Acid
  MOD_RES (1)..(1): (R)-2-allylpyrrolidine-2-carboxylic acid
  MOD_RES (3)..(3): (S)-2-amino-4,4-dimethylpentanoic acid
  MOD_RES (4)..(4): (S)-2-amino-2-methyloct-7-enoic acid
  MOD_RES (11)..(11): 2-amino-2-methylpropanoic acid
  MOD_RES (12)..(12): (S)-2-amino-3-(thiophen-3-yl)propanoic acid
  MOD_RES (13)..(13): (S)-2-amino-3-(benzo[b]thiophen-3-yl)propanoic acid
  C-term amino
XDXXDDAAFLXXXQ

SEQ ID NO: 1516 - protein, 14 aa, Artificial Sequence
  Description of Artificial Sequence: Synthetic peptide
  N-term Acetic Acid
  MOD_RES (1)..(1): (R)-2-allylpyrrolidine-2-carboxylic acid
  MOD_RES (3)..(3): (S)-2-amino-4,4-dimethylpentanoic acid
  MOD_RES (4)..(4): (S)-2-amino-2-methylhex-5-enoic acid
  MOD_RES (11)..(11): 2-amino-2-methylpropanoic acid
  MOD_RES (12)..(12): (S)-2-amino-3-(thiophen-3-yl)propanoic acid
  MOD_RES (13)..(13): (S)-2-amino-3-(benzo[b]thiophen-3-yl)propanoic acid
  C-term amino
XDXXDDAAFLXXXQ

SEQ ID NO: 1517 - protein, 14 aa, Artificial Sequence
  Description of Artificial Sequence: Synthetic peptide
  N-term Acetic Acid
  MOD_RES (1)..(1): (R)-2-allylpyrrolidine-2-carboxylic acid
  MOD_RES (3)..(3): (S)-2-amino-4,4-dimethylpentanoic acid
  MOD_RES (4)..(4): (S)-2-amino-2-methylpent-4-enoic acid
  MOD_RES (11)..(11): 2-amino-2-methylpropanoic acid
  MOD_RES (12)..(12): (S)-2-amino-3-(thiophen-3-yl)propanoic acid
  MOD_RES (13)..(13): (S)-2-amino-3-(benzo[b]thiophen-3-yl)propanoic acid
  C-term amino
XDXXDDAAFLXXXQ

SEQ ID NO: 1518 - protein, 14 aa, Artificial Sequence
  Description of Artificial Sequence: Synthetic peptide
  MOD_RES (1)..(1): pent-4-enoyl-D-proline
  MOD_RES (3)..(3): (S)-2-amino-4,4-dimethylpentanoic acid
  MOD_RES (4)..(4): 2-amino-2-(pent-4-en-1-yl)hept-6-enoic acid
  MOD_RES (6)..(6): (S)-3-(2-amino-2-carboxyethyl)benzoic acid
  MOD_RES (11)..(11): (S)-3-amino-1-((pent-4-en-1-yloxy)carbonyl)pyrrolidine-3- carboxylic acid
  MOD_RES (12)..(12): (S)-2-amino-3-(2-chlorophenyl)propanoic acid
  MOD_RES (13)..(13): (S)-2-amino-3-(benzo[b]thiophen-3-yl)propanoic acid
  C-term amino
PDXXDXAAFLXFXQ

SEQ ID NO: 1519 - protein, 14 aa, Artificial Sequence
  Description of Artificial Sequence: Synthetic peptide
  MOD_RES (1)..(1): hex-5-enoyl-D-proline
  MOD_RES (3)..(3): (S)-2-amino-4,4-dimethylpentanoic acid
  MOD_RES (4)..(4): 2-amino-2-(pent-4-en-1-yl)hept-6-enoic acid
  MOD_RES (6)..(6): (S)-3-(2-amino-2-carboxyethyl)benzoic acid
  MOD_RES (11)..(11): (S)-3-amino-1-((pent-4-en-1-yloxy)carbonyl)pyrrolidine-3- carboxylic acid
  MOD_RES (12)..(12): (S)-2-amino-3-(2-chlorophenyl)propanoic acid
  MOD_RES (13)..(13): (S)-2-amino-3-(benzo[b]thiophen-3-yl)propanoic acid
  C-term amino
PDXXDXAAFLXFXQ

SEQ ID NO: 1520 - protein, 14 aa, Artificial Sequence
  Description of Artificial Sequence: Synthetic peptide
  MOD_RES (1)..(1): hex-5-enoyl-D-proline
  MOD_RES (3)..(3): (S)-2-amino-4,4-dimethylpentanoic acid
  MOD_RES (4)..(4): 2-amino-2-(pent-4-en-1-yl)hept-6-enoic acid
  MOD_RES (6)..(6): (S)-2-amino-3-((carboxymethyl)(2,2,2-trifluoroethyl)amino) propanoic acid
  MOD_RES (11)..(11): (S)-3-amino-1-((pent-4-en-1-yloxy)carbonyl)pyrrolidine-3- carboxylic acid
  MOD_RES (12)..(12): (S)-2-amino-3-(2-chlorophenyl)propanoic acid
  MOD_RES (13)..(13): (S)-2-amino-3-(benzo[b]thiophen-3-yl)propanoic acid
  C-term amino
PDXXDXAAFTXFXQ

SEQ ID NO: 1521 - protein, 14 aa, Artificial Sequence
  Description of Artificial Sequence: Synthetic peptide
  N-term Acetic Acid
  MOD_RES (3)..(3): (S)-2-amino-4,4-dimethylpentanoic acid
  MOD_RES (4)..(4): (R)-2-amino-2-methyloct-7-enoic acid
  MOD_RES (11)..(11): (S)-3-amino-1-((pent-4-en-1-yloxy)carbonyl)pyrrolidine-3- carboxylic acid
  MOD_RES (12)..(12): (S)-2-amino-3-(thiophen-3-yl)propanoic acid
  MOD_RES (13)..(13): (S)-2-amino-3-(benzo[b]thiophen-3-yl)propanoic acid
  C-term amino
PDXXDDAAFLXXXQ

SEQ ID NO: 1522 - protein, 14 aa, Artificial Sequence
  Description of Artificial Sequence: Synthetic peptide
  N-term Acetic Acid
  MOD_RES (3)..(3): (S)-2-amino-4,4-dimethylpentanoic acid
  MOD_RES (4)..(4): (R)-2-amino-2-methylhex-5-enoic acid
  MOD_RES (11)..(11): (S)-3-amino-1-((pent-4-en-1-yloxy)carbonyl)pyrrolidine-3- carboxylic acid
  MOD_RES (12)..(12): (S)-2-amino-3-(thiophen-3-yl)propanoic acid
  MOD_RES (13)..(13): (S)-2-amino-3-(benzo[b]thiophen-3-yl)propanoic acid
  C-term amino
PDXXDDAAFLXXXQ

SEQ ID NO: 1523 - protein, 14 aa, Artificial Sequence
  Description of Artificial Sequence: Synthetic peptide
  N-term Acetic Acid
  MOD_RES (3)..(3): (S)-2-amino-4,4-dimethylpentanoic acid
  MOD_RES (4)..(4): (R)-2-amino-2-methylpent-4-enoic acid
  MOD_RES (11)..(11): (S)-3-amino-1-((pent-4-en-1-yloxy)carbonyl)pyrrolidine-3- carboxylic acid
  MOD_RES (12)..(12): (S)-2-amino-3-(thiophen-3-yl)propanoic acid
  MOD_RES (13)..(13): (S)-2-amino-3-(benzo[b]thiophen-3-yl)propanoic acid
  C-term amino
PDXXDDAAFLXXXQ

SEQ ID NO: 1524 - protein, 14 aa, Artificial Sequence
  Description of Artificial Sequence: Synthetic peptide
  N-term Acetic Acid
  MOD_RES (1)..(1): (R)-2-allylpyrrolidine-2-carboxylic acid
  MOD_RES (3)..(3): (S)-2-amino-4,4-dimethylpentanoic acid
  MOD_RES (4)..(4): 2-amino-2-(pent-4-en-1-yl)hept-6-enoic acid
  MOD_RES (11)..(11): (S)-3-amino-1-((pent-4-en-1-yloxy)carbonyl)pyrrolidine-3- carboxylic acid
  MOD_RES (12)..(12): (S)-2-amino-4-phenylbutanoic acid
  MOD_RES (13)..(13): (S)-2-amino-3-(benzo[b]thiophen-3-yl)propanoic acid
  C-term amino
XDXXNTAAFNXXXQ

SEQ ID NO: 1525 - protein, 14 aa, Artificial Sequence
  Description of Artificial Sequence: Synthetic peptide
  N-term Acetic Acid
  MOD_RES (1)..(1): (R)-2-allylpyrrolidine-2-carboxylic acid
  MOD_RES (3)..(3): (S)-2-amino-4,4-dimethylpentanoic acid
  MOD_RES (4)..(4): 2-amino-2-(pent-4-en-1-yl)hept-6-enoic acid
  MOD_RES (11)..(11): (S)-3-amino-1-((pent-4-en-1-yloxy)carbonyl)pyrrolidine-3- carboxylic acid
  MOD_RES (12)..(12): (S)-2-amino-3-(3-(trifluoromethyl)phenyl)propanoic acid
  MOD_RES (13)..(13): (S)-2-amino-3-(benzo[b]thiophen-3-yl)propanoic acid
  C-term amino
XDXXNTAAFNXFXQ

SEQ ID NO: 1526 - protein, 14 aa, Artificial Sequence
  Description of Artificial Sequence: Synthetic peptide
  N-term Acetic Acid
  MOD_RES (1)..(1): (R)-2-allylpyrrolidine-2-carboxylic acid
  MOD_RES (3)..(3): (S)-2-amino-4,4-dimethylpentanoic acid
  MOD_RES (4)..(4): 2-amino-2-(pent-4-en-1-yl)hept-6-enoic acid
  MOD_RES (11)..(11): (S)-3-amino-1-((pent-4-en-1-yloxy)carbonyl)pyrrolidine-3- carboxylic acid
  MOD_RES (12)..(12): (S)-2-amino-3-(2-chlorophenyl)propanoic acid
  MOD_RES (13)..(13): (S)-2-amino-3-(benzo[b]thiophen-3-yl)propanoic acid
  C-term amino
XDXXNTAAFNXFXQ

SEQ ID NO: 1527 - protein, 14 aa, Artificial Sequence
  Description of Artificial Sequence: Synthetic peptide
  N-term Acetic Acid
  MOD_RES (1)..(1): (R)-2-allylpyrrolidine-2-carboxylic acid
  MOD_RES (3)..(3): (S)-2-amino-4,4-dimethylpentanoic acid
  MOD_RES (4)..(4): 2-amino-2-(pent-4-en-1-yl)hept-6-enoic acid
  MOD_RES (11)..(11): (S)-3-amino-1-((pent-4-en-1-yloxy)carbonyl)pyrrolidine-3- carboxylic acid
  MOD_RES (12)..(12): (S)-2-amino-3-(3-chlorophenyl)propanoic acid
  MOD_RES (13)..(13): (S)-2-amino-3-(benzo[b]thiophen-3-yl)propanoic acid
  C-term amino
XDXXNTAAFNXFXQ

SEQ ID NO: 1528 - protein, 14 aa, Artificial Sequence
  Description of Artificial Sequence: Synthetic peptide
  N-term Acetic Acid
  MOD_RES (1)..(1): (R)-2-allylpyrrolidine-2-carboxylic acid
  MOD_RES (4)..(4): 2-amino-2-(pent-4-en-1-yl)hept-6-enoic acid
  MOD_RES (11)..(11): (S)-3-amino-1-((pent-4-en-1-yloxy)carbonyl)pyrrolidine-3- carboxylic acid
  MOD_RES (12)..(12): (S)-2-amino-3-(thiophen-3-yl)propanoic acid
  MOD_RES (13)..(13): (S)-2-amino-3-(benzo[b]thiophen-3-yl)propanoic acid
  C-term amino
XDAXNTAAFNXXXQ

SEQ ID NO: 1529 - protein, 14 aa, Artificial Sequence
  Description of Artificial Sequence: Synthetic peptide
  N-term Acetic Acid
  MOD_RES (1)..(1): (R)-2-allylpyrrolidine-2-carboxylic acid
  MOD_RES (3)..(3): (S)-2-amino-4,4-dimethylpentanoic acid
  MOD_RES (4)..(4): 2-amino-2-(pent-4-en-1-yl)hept-6-enoic acid
  MOD_RES (7)..(7): N6-isopropyl-L-lysine
  MOD_RES (11)..(11): (S)-3-amino-1-((pent-4-en-1-yloxy)carbonyl)pyrrolidine-3- carboxylic acid
  MOD_RES (12)..(12): (S)-2-amino-3-(thiophen-3-yl)propanoic acid
  MOD_RES (13)..(13): (S)-2-amino-3-(benzo[b]thiophen-3-yl)propanoic acid
  C-term amino
XDXXNTKAFNXXXQ

SEQ ID NO: 1530 - protein, 14 aa, Artificial Sequence
  Description of Artificial Sequence: Synthetic peptide
  N-term Acetic Acid
  MOD_RES (1)..(1): (R)-2-allylpyrrolidine-2-carboxylic acid
  MOD_RES (3)..(3): (S)-2-amino-4,4-dimethylpentanoic acid
  MOD_RES (4)..(4): 2-amino-2-(pent-4-en-1-yl)hept-6-enoic acid
  MOD_RES (8)..(8): N6-isopropyl-L-lysine
  MOD_RES (11)..(11): (S)-3-amino-1-((pent-4-en-1-yloxy)carbonyl)pyrrolidine-3- carboxylic acid
  MOD_RES (12)..(12): (S)-2-amino-3-(thiophen-3-yl)propanoic acid
  MOD_RES (13)..(13): (S)-2-amino-3-(benzo[b]thiophen-3-yl)propanoic acid
  C-term amino
XDXXNTAKFNXXXQ

SEQ ID NO: 1531 - protein, 14 aa, Artificial Sequence
  Description of Artificial Sequence: Synthetic peptide
  N-term Acetic Acid
  MOD_RES (1)..(1): (R)-2-allylpyrrolidine-2-carboxylic acid
  MOD_RES (3)..(3): (S)-2-amino-4,4-dimethylpentanoic acid
  MOD_RES (4)..(4): 2-amino-2-(pent-4-en-1-yl)hept-6-enoic acid
  MOD_RES (9)..(9): (S)-2-amino-4-phenylbutanoic acid
  MOD_RES (11)..(11): (S)-3-amino-1-((pent-4-en-1-yloxy)carbonyl)pyrrolidine-3- carboxylic acid
  MOD_RES (12)..(12): (S)-2-amino-3-(thiophen-3-yl)propanoic acid
  MOD_RES (13)..(13): (S)-2-amino-3-(benzo[b]thiophen-3-yl)propanoic acid
  C-term amino
XDXXNTAAXNXXXQ

SEQ ID NO: 1532 - protein, 14 aa, Artificial Sequence
  Description of Artificial Sequence: Synthetic peptide
  N-term Acetic Acid
  MOD_RES (1)..(1): (R)-2-allylpyrrolidine-2-carboxylic acid
  MOD_RES (3)..(3): (S)-2-amino-4,4-dimethylpentanoic acid
  MOD_RES (4)..(4): 2-amino-2-(pent-4-en-1-yl)hept-6-enoic acid
  MOD_RES (9)..(9): (S)-2-amino-3-(3-(trifluoromethyl)phenyl)propanoic acid
  MOD_RES (11)..(11): (S)-3-amino-1-((pent-4-en-1-yloxy)carbonyl)pyrrolidine-3- carboxylic acid
  MOD_RES (12)..(12): (S)-2-amino-3-(thiophen-3-yl)propanoic acid
  MOD_RES (13)..(13): (S)-2-amino-3-(benzo[b]thiophen-3-yl)propanoic acid
  C-term amino
XDXXNTAAFNXXXQ

SEQ ID NO: 1533 - protein, 14 aa, Artificial Sequence
  Description of Artificial Sequence: Synthetic peptide
  N-term Acetic Acid
  MOD_RES (1)..(1): (R)-2-allylpyrrolidine-2-carboxylic acid
  MOD_RES (3)..(3): (S)-2-amino-4,4-dimethylpentanoic acid
  MOD_RES (4)..(4): 2-amino-2-(pent-4-en-1-yl)hept-6-enoic acid
  MOD_RES (9)..(9): (S)-2-amino-3-(2-chlorophenyl)propanoic acid
  MOD_RES (11)..(11): (S)-3-amino-1-((pent-4-en-1-yloxy)carbonyl)pyrrolidine-3- carboxylic acid
  MOD_RES (12)..(12): (S)-2-amino-3-(thiophen-3-yl)propanoic acid
  MOD_RES (13)..(13): (S)-2-amino-3-(benzo[b]thiophen-3-yl)propanoic acid
  C-term amino
XDXXNTAAFNXXXQ

SEQ ID NO: 1534 - protein, 14 aa, Artificial Sequence
  Description of Artificial Sequence: Synthetic peptide
  N-term Acetic Acid
  MOD_RES (1)..(1): (R)-2-allylpyrrolidine-2-carboxylic acid
  MOD_RES (3)..(3): (S)-2-amino-4,4-dimethylpentanoic acid
  MOD_RES (4)..(4): 2-amino-2-(pent-4-en-1-yl)hept-6-enoic acid
  MOD_RES (9)..(9): (S)-2-amino-3-(3-chlorophenyl)propanoic acid
  MOD_RES (11)..(11): (S)-3-amino-1-((pent-4-en-1-yloxy)carbonyl)pyrrolidine-3- carboxylic acid
  MOD_RES (12)..(12): (S)-2-amino-3-(thiophen-3-yl)propanoic acid
  MOD_RES (13)..(13): (S)-2-amino-3-(benzo[b]thiophen-3-yl)propanoic acid
  C-term amino
XDXXNTAAFNXXXQ

SEQ ID NO: 1535 - protein, 14 aa, Artificial Sequence
  Description of Artificial Sequence: Synthetic peptide
  N-term Acetic Acid
  MOD_RES (1)..(1): (R)-2-allylpyrrolidine-2-carboxylic acid
  MOD_RES (3)..(3): (S)-2-amino-4,4-dimethylpentanoic acid
  MOD_RES (4)..(4): 2-amino-2-(pent-4-en-1-yl)hept-6-enoic acid
  MOD_RES (11)..(11): (S)-3-amino-1-((pent-4-en-1-yloxy)carbonyl)pyrrolidine-3- carboxylic acid
  MOD_RES (12)..(12): (S)-2-amino-3-(thiophen-3-yl)propanoic acid
  MOD_RES (13)..(13): (S)-2-amino-3-(benzo[b]thiophen-3-yl)propanoic acid
  C-term amino
XDXXNTAAYNXXXQ

SEQ ID NO: 1536 - protein, 14 aa, Artificial Sequence
  Description of Artificial Sequence: Synthetic peptide
  N-term Acetic Acid
  MOD_RES (1)..(1): (R)-2-allylpyrrolidine-2-carboxylic acid
  MOD_RES (3)..(3): (S)-2-amino-4,4-dimethylpentanoic acid
  MOD_RES (4)..(4): 2-amino-2-(pent-4-en-1-yl)hept-6-enoic acid
  MOD_RES (11)..(11): (R)-3-amino-1-((pent-4-en-1-yloxy)carbonyl)pyrrolidine-3- carboxylic acid
  MOD_RES (12)..(12): (S)-2-amino-3-(thiophen-3-yl)propanoic acid
  MOD_RES (13)..(13): (S)-2-amino-3-(benzo[b]thiophen-3-yl)propanoic acid
  C-term amino
XDXXDDAAFNXXXQ

SEQ ID NO: 1537 - protein, 14 aa, Artificial Sequence
  Description of Artificial Sequence: Synthetic peptide
  N-term Acetic Acid
  MOD_RES (1)..(1): (R)-2-allylpyrrolidine-2-carboxylic acid
  MOD_RES (3)..(3): (S)-2-amino-4,4-dimethylpentanoic acid
  MOD_RES (4)..(4): 2-amino-2-(pent-4-en-1-yl)hept-6-enoic acid
  MOD_RES (11)..(11): (R)-3-amino-1-((pent-4-en-1-yloxy)carbonyl)pyrrolidine-3- carboxylic acid
  MOD_RES (12)..(12): (S)-2-amino-3-(thiophen-3-yl)propanoic acid
  MOD_RES (13)..(13): (S)-2-amino-3-(benzo[b]thiophen-3-yl)propanoic acid
  C-term amino
XDXXDDAAFLXXXQ

SEQ ID NO: 1538 - protein, 14 aa, Artificial Sequence
  Description of Artificial Sequence: Synthetic peptide
  N-term Acetic Acid
  MOD_RES (1)..(1): (R)-2-allylpyrrolidine-2-carboxylic acid
  MOD_RES (3)..(3): (S)-2-amino-4,4-dimethylpentanoic acid
  MOD_RES (4)..(4): 2-amino-2-(pent-4-en-1-yl)hept-6-enoic acid
  MOD_RES (6)..(6): (S)-3-(2-amino-2-carboxyethyl)benzoic acid
  MOD_RES (11)..(11): (S)-3-amino-1-((pent-4-en-1-yloxy)carbonyl)pyrrolidine-3- carboxylic acid
  MOD_RES (12)..(12): (S)-2-amino-3-(2-chlorophenyl)propanoic acid
  MOD_RES (13)..(13): (S)-2-amino-3-(benzo[b]thiophen-3-yl)propanoic acid
  C-term amino
XDXXDXAAFAXFXA

SEQ ID NO: 1539 - protein, 14 aa, Artificial Sequence
  Description of Artificial Sequence: Synthetic peptide
  N-term Acetic Acid
  MOD_RES (1)..(1): (R)-2-allylpyrrolidine-2-carboxylic acid
  MOD_RES (3)..(3): (S)-2-amino-4,4-dimethylpentanoic acid
  MOD_RES (4)..(4): 2-amino-2-(pent-4-en-1-yl)hept-6-enoic acid
  MOD_RES (6)..(6): (S)-3-(2-amino-2-carboxyethyl)benzoic acid
  MOD_RES (11)..(11): (S)-3-amino-1-((pent-4-en-1-yloxy)carbonyl)pyrrolidine-3- carboxylic acid
  MOD_RES (12)..(12): (S)-2-amino-3-(2-chlorophenyl)propanoic acid
  MOD_RES (13)..(13): (S)-2-amino-3-(benzo[b]thiophen-3-yl)propanoic acid
  C-term amino
XDXXDXAAFAXFXV

SEQ ID NO: 1540 - protein, 14 aa, Artificial Sequence
  Description of Artificial Sequence: Synthetic peptide
  N-term Acetic Acid
  MOD_RES (1)..(1): (R)-2-allylpyrrolidine-2-carboxylic acid
  MOD_RES (3)..(3): (S)-2-amino-4,4-dimethylpentanoic acid
  MOD_RES (4)..(4): 2-amino-2-(pent-4-en-1-yl)hept-6-enoic acid
  MOD_RES (6)..(6): (S)-3-(2-amino-2-carboxyethyl)benzoic acid
  MOD_RES (11)..(11): (S)-3-amino-1-((pent-4-en-1-yloxy)carbonyl)pyrrolidine-3- carboxylic acid
  MOD_RES (12)..(12): (S)-2-amino-3-(2-chlorophenyl)propanoic acid
  MOD_RES (13)..(13): (S)-2-amino-3-(benzo[b]thiophen-3-yl)propanoic acid
  C-term amino
XDXXDXAAFAXFXF

SEQ ID NO: 1541 - protein, 14 aa, Artificial Sequence
  Description of Artificial Sequence: Synthetic peptide
  N-term Acetic Acid
  MOD_RES (1)..(1): (R)-2-allylpyrrolidine-2-carboxylic acid
  MOD_RES (3)..(3): (S)-2-amino-4,4-dimethylpentanoic acid
  MOD_RES (4)..(4): 2-amino-2-(pent-4-en-1-yl)hept-6-enoic acid
  MOD_RES (6)..(6): (S)-3-(2-amino-2-carboxyethyl)benzoic acid
  MOD_RES (11)..(11): (S)-3-amino-1-((pent-4-en-1-yloxy)carbonyl)pyrrolidine-3- carboxylic acid
  MOD_RES (12)..(12): (S)-2-amino-3-(2-chlorophenyl)propanoic acid
  MOD_RES (13)..(13): (S)-2-amino-3-(benzo[b]thiophen-3-yl)propanoic acid
  MOD_RES (14)..(14): D-alanine
  C-term amino
XDXXDXAAFAXFXA

SEQ ID NO: 1542 - protein, 14 aa, Artificial Sequence
  Description of Artificial Sequence: Synthetic peptide
  N-term Acetic Acid
  MOD_RES (1)..(1): (R)-2-allylpyrrolidine-2-carboxylic acid
  MOD_RES (3)..(3): (S)-2-amino-4,4-dimethylpentanoic acid
  MOD_RES (4)..(4): 2-amino-2-(pent-4-en-1-yl)hept-6-enoic acid
  MOD_RES (6)..(6): (S)-3-(2-amino-2-carboxyethyl)benzoic acid
  MOD_RES (11)..(11): (S)-3-amino-1-((pent-4-en-1-yloxy)carbonyl)pyrrolidine-3- carboxylic acid
  MOD_RES (12)..(12): (S)-2-amino-3-(2-chlorophenyl)propanoic acid
  MOD_RES (13)..(13): (S)-2-amino-3-(benzo[b]thiophen-3-yl)propanoic acid
  C-term amino
XDXXDXAAFSXFXA

SEQ ID NO: 1543 - protein, 14 aa, Artificial Sequence
  Description of Artificial Sequence: Synthetic peptide
  N-term Acetic Acid
  MOD_RES (1)..(1): (R)-2-allylpyrrolidine-2-carboxylic acid
  MOD_RES (3)..(3): (S)-2-amino-4,4-dimethylpentanoic acid
  MOD_RES (4)..(4): 2-amino-2-(pent-4-en-1-yl)hept-6-enoic acid
  MOD_RES (6)..(6): (S)-3-(2-amino-2-carboxyethyl)benzoic acid
  MOD_RES (11)..(11): (S)-3-amino-1-((pent-4-en-1-yloxy)carbonyl)pyrrolidine-3- carboxylic acid
  MOD_RES (12)..(12): (S)-2-amino-3-(2-chlorophenyl)propanoic acid
  MOD_RES (13)..(13): (S)-2-amino-3-(benzo[b]thiophen-3-yl)propanoic acid
  C-term amino
XDXXDXAAFSXFXV

SEQ ID NO: 1544 - protein, 14 aa, Artificial Sequence
  Description of Artificial Sequence: Synthetic peptide
  N-term Acetic Acid
  MOD_RES (1)..(1): (R)-2-allylpyrrolidine-2-carboxylic acid
  MOD_RES (3)..(3): (S)-2-amino-4,4-dimethylpentanoic acid
  MOD_RES (4)..(4): 2-amino-2-(pent-4-en-1-yl)hept-6-enoic acid
  MOD_RES (6)..(6): (S)-3-(2-amino-2-carboxyethyl)benzoic acid
  MOD_RES (11)..(11): (S)-3-amino-1-((pent-4-en-1-yloxy)carbonyl)pyrrolidine-3- carboxylic acid
  MOD_RES (12)..(12): (S)-2-amino-3-(2-chlorophenyl)propanoic acid
  MOD_RES (13)..(13): (S)-2-amino-3-(benzo[b]thiophen-3-yl)propanoic acid
  C-term amino
XDXXDXAAFSXFXF

SEQ ID NO: 1545 - protein, 14 aa, Artificial Sequence
  Description of Artificial Sequence: Synthetic peptide
  N-term Acetic Acid
  MOD_RES (1)..(1): (R)-2-allylpyrrolidine-2-carboxylic acid
  MOD_RES (3)..(3): (S)-2-amino-4,4-dimethylpentanoic acid
  MOD_RES (4)..(4): 2-amino-2-(pent-4-en-1-yl)hept-6-enoic acid
  MOD_RES (6)..(6): (S)-3-(2-amino-2-carboxyethyl)benzoic acid
  MOD_RES (11)..(11): (S)-3-amino-1-((pent-4-en-1-yloxy)carbonyl)pyrrolidine-3- carboxylic acid
  MOD_RES (12)..(12): (S)-2-amino-3-(2-chlorophenyl)propanoic acid
  MOD_RES (13)..(13): (S)-2-amino-3-(benzo[b]thiophen-3-yl)propanoic acid
  MOD_RES (14)..(14): D-alanine
  C-term amino
XDXXDXAAFSXFXA

SEQ ID NO: 1546 - protein, 14 aa, Artificial Sequence
  Description of Artificial Sequence: Synthetic peptide
  N-term Acetic Acid
  MOD_RES (1)..(1): (R)-2-allylpyrrolidine-2-carboxylic acid
  MOD_RES (3)..(3): (S)-2-amino-4,4-dimethylpentanoic acid
  MOD_RES (4)..(4): 2-amino-2-(pent-4-en-1-yl)hept-6-enoic acid
  MOD_RES (6)..(6): (S)-3-(2-amino-2-carboxyethyl)benzoic acid
  MOD_RES (11)..(11): (S)-3-amino-1-((pent-4-en-1-yloxy)carbonyl)pyrrolidine-3- carboxylic acid
  MOD_RES (12)..(12): (S)-2-amino-3-(2-chlorophenyl)propanoic acid
  MOD_RES (13)..(13): (S)-2-amino-3-(benzo[b]thiophen-3-yl)propanoic acid
  C-term amino
XDXXDXAAFNXFXA

SEQ ID NO: 1547 - protein, 14 aa, Artificial Sequence
  Description of Artificial Sequence: Synthetic peptide
  N-term Acetic Acid
  MOD_RES (1)..(1): (R)-2-allylpyrrolidine-2-carboxylic acid
  MOD_RES (3)..(3): (S)-2-amino-4,4-dimethylpentanoic acid
  MOD_RES (4)..(4): 2-amino-2-(pent-4-en-1-yl)hept-6-enoic acid
  MOD_RES (6)..(6): (S)-3-(2-amino-2-carboxyethyl)benzoic acid
  MOD_RES (11)..(11): (S)-3-amino-1-((pent-4-en-1-yloxy)carbonyl)pyrrolidine-3- carboxylic acid
  MOD_RES (12)..(12): (S)-2-amino-3-(2-chlorophenyl)propanoic acid
  MOD_RES (13)..(13): (S)-2-amino-3-(benzo[b]thiophen-3-yl)propanoic acid
  C-term amino
XDXXDXAAFNXFXV

SEQ ID NO: 1548 - protein, 14 aa, Artificial Sequence
  Description of Artificial Sequence: Synthetic peptide
  N-term Acetic Acid
  MOD_RES (1)..(1): (R)-2-allylpyrrolidine-2-carboxylic acid
  MOD_RES (3)..(3): (S)-2-amino-4,4-dimethylpentanoic acid
  MOD_RES (4)..(4): 2-amino-2-(pent-4-en-1-yl)hept-6-enoic acid
  MOD_RES (6)..(6): (S)-3-(2-amino-2-carboxyethyl)benzoic acid
  MOD_RES (11)..(11): (S)-3-amino-1-((pent-4-en-1-yloxy)carbonyl)pyrrolidine-3- carboxylic acid
  MOD_RES (12)..(12): (S)-2-amino-3-(2-chlorophenyl)propanoic acid
  MOD_RES (13)..(13): (S)-2-amino-3-(benzo[b]thiophen-3-yl)propanoic acid
  C-term amino
XDXXDXAAFNXFXF

SEQ ID NO: 1549 - protein, 14 aa, Artificial Sequence
  Description of Artificial Sequence: Synthetic peptide
  N-term Acetic Acid
  MOD_RES (1)..(1): (R)-2-allylpyrrolidine-2-carboxylic acid
  MOD_RES (3)..(3): (S)-2-amino-4,4-dimethylpentanoic acid
  MOD_RES (4)..(4): 2-amino-2-(pent-4-en-1-yl)hept-6-enoic acid
  MOD_RES (6)..(6): (S)-3-(2-amino-2-carboxyethyl)benzoic acid
  MOD_RES (11)..(11): (S)-3-amino-1-((pent-4-en-1-yloxy)carbonyl)pyrrolidine-3- carboxylic acid
  MOD_RES (12)..(12): (S)-2-amino-3-(2-chlorophenyl)propanoic acid
  MOD_RES (13)..(13): (S)-2-amino-3-(benzo[b]thiophen-3-yl)propanoic acid
  MOD_RES (14)..(14): D-alanine
  C-term amino
XDXXDXAAFNXFXA

SEQ ID NO: 1550 - protein, 14 aa, Artificial Sequence
  Description of Artificial Sequence: Synthetic peptide
  N-term Acetic Acid
  MOD_RES (1)..(1): (R)-2-allylpyrrolidine-2-carboxylic acid
  MOD_RES (3)..(3): (S)-2-amino-4,4-dimethylpentanoic acid
  MOD_RES (4)..(4): 2-amino-2-(pent-4-en-1-yl)hept-6-enoic acid
  MOD_RES (6)..(6): (S)-3-(2-amino-2-carboxyethyl)benzoic acid
  MOD_RES (11)..(11): (S)-3-amino-1-((pent-4-en-1-yloxy)carbonyl)pyrrolidine-3- carboxylic acid
  MOD_RES (12)..(12): (S)-2-amino-3-(2-chlorophenyl)propanoic acid
  MOD_RES (13)..(13): (S)-2-amino-3-(benzo[b]thiophen-3-yl)propanoic acid
  C-term amino
XDXXDXAAFAXFXN

SEQ ID NO: 1551 - protein, 14 aa, Artificial Sequence
  Description of Artificial Sequence: Synthetic peptide
  N-term Acetic Acid
  MOD_RES (1)..(1): (R)-2-allylpyrrolidine-2-carboxylic acid
  MOD_RES (3)..(3): (S)-2-amino-4,4-dimethylpentanoic acid
  MOD_RES (4)..(4): 2-amino-2-(pent-4-en-1-yl)hept-6-enoic acid
  MOD_RES (6)..(6): (S)-3-(2-amino-2-carboxyethyl)benzoic acid
  MOD_RES (11)..(11): (S)-3-amino-1-((pent-4-en-1-yloxy)carbonyl)pyrrolidine-3- carboxylic acid
  MOD_RES (12)..(12): (S)-2-amino-3-(2-chlorophenyl)propanoic acid
  MOD_RES (13)..(13): (S)-2-amino-3-(benzo[b]thiophen-3-yl)propanoic acid
  C-term amino
XDXXDXAAFFXFXN

SEQ ID NO: 1552 - protein, 14 aa, Artificial Sequence
  Description of Artificial Sequence: Synthetic peptide
  N-term Acetic Acid
  MOD_RES (1)..(1): (R)-2-allylpyrrolidine-2-carboxylic acid
  MOD_RES (3)..(3): (S)-2-amino-4,4-dimethylpentanoic acid
  MOD_RES (4)..(4): 2-amino-2-(pent-4-en-1-yl)hept-6-enoic acid
  MOD_RES (6)..(6): (S)-3-(2-amino-2-carboxyethyl)benzoic acid
  MOD_RES (11)..(11): (S)-3-amino-1-((pent-4-en-1-yloxy)carbonyl)pyrrolidine-3- carboxylic acid
  MOD_RES (12)..(12): (S)-2-amino-3-(2-chlorophenyl)propanoic acid
  MOD_RES (13)..(13): (S)-2-amino-3-(benzo[b]thiophen-3-yl)propanoic acid
  C-term amino
XDXXDXAAFSXFXN

SEQ ID NO: 1553 - protein, 17 aa, Artificial Sequence
  Description of Artificial Sequence: Synthetic peptide
  N-term Acetic Acid
  MOD_RES (1)..(1): (R)-2-allylpyrrolidine-2-carboxylic acid
  MOD_RES (3)..(3): (S)-2-amino-4,4-dimethylpentanoic acid
  MOD_RES (4)..(4): 2-amino-2-(pent-4-en-1-yl)hept-6-enoic acid
  MOD_RES (6)..(6): (S)-3-(2-amino-2-carboxyethyl)benzoic acid
  MOD_RES (11)..(11): (S)-3-amino-1-((pent-4-en-1-yloxy)carbonyl)pyrrolidine-3- carboxylic acid
  MOD_RES (12)..(12): (S)-2-amino-3-(2-chlorophenyl)propanoic acid
  MOD_RES (13)..(13): (S)-2-amino-3-(benzo[b]thiophen-3-yl)propanoic acid
  C-term amino
XDXXDXAAFLXFXNAAA

SEQ ID NO: 1554 - protein, 17 aa, Artificial Sequence
  Description of Artificial Sequence: Synthetic peptide
  N-term Acetic Acid
  MOD_RES (1)..(1): (R)-2-allylpyrrolidine-2-carboxylic acid
  MOD_RES (3)..(3): (S)-2-amino-4,4-dimethylpentanoic acid
  MOD_RES (4)..(4): 2-amino-2-(pent-4-en-1-yl)hept-6-enoic acid
  MOD_RES (6)..(6): (S)-3-(2-amino-2-carboxyethyl)benzoic acid
  MOD_RES (11)..(11): (S)-3-amino-1-((pent-4-en-1-yloxy)carbonyl)pyrrolidine-3- carboxylic acid
  MOD_RES (12)..(12): (S)-2-amino-3-(2-chlorophenyl)propanoic acid
  MOD_RES (13)..(13): (S)-2-amino-3-(benzo[b]thiophen-3-yl)propanoic acid
  MOD_RES (17)..(17): D-alanine
  C-term amino
XDXXDXAAFLXFXNAAA

SEQ ID NO: 1555 - protein, 14 aa, Artificial Sequence
  Description of Artificial Sequence: Synthetic peptide
  N-term Acetic Acid
  MOD_RES (1)..(1): (R)-2-allylpyrrolidine-2-carboxylic acid
  MOD_RES (3)..(3): (S)-2-amino-4,4-dimethylpentanoic acid
  MOD_RES (4)..(4): 2-amino-2-(pent-4-en-1-yl)hept-6-enoic acid
  MOD_RES (6)..(6): (S)-3-(2-amino-2-carboxyethyl)benzoic acid
  MOD_RES (11)..(11): (S)-3-amino-1-((pent-4-en-1-yloxy)carbonyl)pyrrolidine-3- carboxylic acid
  MOD_RES (12)..(12): (S)-2-amino-3-(thiophen-3-yl)propanoic acid
  MOD_RES (13)..(13): (S)-2-amino-3-(benzo[b]thiophen-3-yl)propanoic acid
  C-term amino
XDXXDXAAFAXXXN

SEQ ID NO: 1556 - protein, 14 aa, Artificial Sequence
  Description of Artificial Sequence: Synthetic peptide
  N-term Acetic Acid
  MOD_RES (1)..(1): (R)-2-allylpyrrolidine-2-carboxylic acid
  MOD_RES (3)..(3): (S)-2-amino-4,4-dimethylpentanoic acid
  MOD_RES (4)..(4): 2-amino-2-(pent-4-en-1-yl)hept-6-enoic acid
  MOD_RES (6)..(6): (S)-3-(2-amino-2-carboxyethyl)benzoic acid
  MOD_RES (11)..(11): (S)-3-amino-1-((pent-4-en-1-yloxy)carbonyl)pyrrolidine-3- carboxylic acid
  MOD_RES (12)..(12): (S)-2-amino-3-(thiophen-3-yl)propanoic acid
  MOD_RES (13)..(13): (S)-2-amino-3-(benzo[b]thiophen-3-yl)propanoic acid
  C-term amino
XDXXDXAAFLXXXN

SEQ ID NO: 1557 - protein, 14 aa, Artificial Sequence
  Description of Artificial Sequence: Synthetic peptide
  N-term Acetic Acid
  MOD_RES (1)..(1): (R)-2-allylpyrrolidine-2-carboxylic acid
  MOD_RES (3)..(3): (S)-2-amino-4,4-dimethylpentanoic acid
  MOD_RES (4)..(4): 2-amino-2-(pent-4-en-1-yl)hept-6-enoic acid
  MOD_RES (6)..(6): (S)-3-(2-amino-2-carboxyethyl)benzoic acid
  MOD_RES (11)..(11): (S)-3-amino-1-((pent-4-en-1-yloxy)carbonyl)pyrrolidine-3- carboxylic acid
  MOD_RES (12)..(12): (S)-2-amino-3-(thiophen-3-yl)propanoic acid
  MOD_RES (13)..(13): (S)-2-amino-3-(benzo[b]thiophen-3-yl)propanoic acid
  C-term amino
XDXXDXAAFFXXXN

SEQ ID NO: 1558 - protein, 14 aa, Artificial Sequence
  Description of Artificial Sequence: Synthetic peptide
  N-term Acetic Acid
  MOD_RES (1)..(1): (R)-2-allylpyrrolidine-2-carboxylic acid
  MOD_RES (3)..(3): (S)-2-amino-4,4-dimethylpentanoic acid
  MOD_RES (4)..(4): 2-amino-2-(pent-4-en-1-yl)hept-6-enoic acid
  MOD_RES (6)..(6): (S)-3-(2-amino-2-carboxyethyl)benzoic acid
  MOD_RES (11)..(11): (S)-3-amino-1-((pent-4-en-1-yloxy)carbonyl)pyrrolidine-3- carboxylic acid
  MOD_RES (12)..(12): (S)-2-amino-3-(thiophen-3-yl)propanoic acid
  MOD_RES (13)..(13): (S)-2-amino-3-(benzo[b]thiophen-3-yl)propanoic acid
  C-term amino
XDXXDXAAFSXXXN

SEQ ID NO: 1559 - protein, 17 aa, Artificial Sequence
  Description of Artificial Sequence: Synthetic peptide
  N-term Acetic Acid
  MOD_RES (1)..(1): (R)-2-allylpyrrolidine-2-carboxylic acid
  MOD_RES (3)..(3): (S)-2-amino-4,4-dimethylpentanoic acid
  MOD_RES (4)..(4): 2-amino-2-(pent-4-en-1-yl)hept-6-enoic acid
  MOD_RES (6)..(6): (S)-3-(2-amino-2-carboxyethyl)benzoic acid
  MOD_RES (11)..(11): (S)-3-amino-1-((pent-4-en-1-yloxy)carbonyl)pyrrolidine-3- carboxylic acid
  MOD_RES (12)..(12): (S)-2-amino-3-(thiophen-3-yl)propanoic acid
  MOD_RES (13)..(13): (S)-2-amino-3-(benzo[b]thiophen-3-yl)propanoic acid
  C-term amino
XDXXDXAAFLXXXNAAA

SEQ ID NO: 1560 - protein, 17 aa, Artificial Sequence
  Description of Artificial Sequence: Synthetic peptide
  N-term Acetic Acid
  MOD_RES (1)..(1): (R)-2-allylpyrrolidine-2-carboxylic acid
  MOD_RES (3)..(3): (S)-2-amino-4,4-dimethylpentanoic acid
  MOD_RES (4)..(4): 2-amino-2-(pent-4-en-1-yl)hept-6-enoic acid
  MOD_RES (6)..(6): (S)-3-(2-amino-2-carboxyethyl)benzoic acid
  MOD_RES (11)..(11): (S)-3-amino-1-((pent-4-en-1-yloxy)carbonyl)pyrrolidine-3- carboxylic acid
  MOD_RES (12)..(12): (S)-2-amino-3-(thiophen-3-yl)propanoic acid
  MOD_RES (13)..(13): (S)-2-amino-3-(benzo[b]thiophen-3-yl)propanoic acid
  MOD_RES (17)..(17): D-alanine
  C-term amino
XDXXDXAAFLXXXNAAA

SEQ ID NO: 1561 - protein, 14 aa, Artificial Sequence
  Description of Artificial Sequence: Synthetic peptide
  N-term Acetic Acid
  MOD_RES (1)..(1): (R)-2-allylpyrrolidine-2-carboxylic acid
  MOD_RES (3)..(3): (S)-2-amino-4,4-dimethylpentanoic acid
  MOD_RES (4)..(4): 2-amino-2-(pent-4-en-1-yl)hept-6-enoic acid
  MOD_RES (6)..(6): (S)-2-amino-3-((carboxymethyl)(2,2,2-trifluoroethyl)amino) propanoic acid
  MOD_RES (9)..(9): (R)-2-amino-3-(3-((dimethylamino)methyl)phenyl)propanoic acid
  MOD_RES (11)..(11): (S)-3-amino-1-((pent-4-en-1-yloxy)carbonyl)pyrrolidine-3- carboxylic acid
  MOD_RES (12)..(12): (S)-2-amino-3-(thiophen-3-yl)propanoic acid
  MOD_RES (13)..(13): (S)-2-amino-3-(benzo[b]thiophen-3-yl)propanoic acid
  C-term amino
XDXXDXAAFLXXXQ

SEQ ID NO: 1562 - protein, 14 aa, Artificial Sequence
  Description of Artificial Sequence: Synthetic peptide
  N-term Acetic Acid
  MOD_RES (1)..(1): (R)-2-allylpyrrolidine-2-carboxylic acid
  MOD_RES (3)..(3): (S)-2-amino-4,4-dimethylpentanoic acid
  MOD_RES (4)..(4): 2-amino-2-(pent-4-en-1-yl)hept-6-enoic acid
  MOD_RES (6)..(6): (S)-3-(2-amino-2-carboxyethyl)benzoic acid
  MOD_RES (11)..(11): (S)-3-amino-1-((pent-4-en-1-yloxy)carbonyl)pyrrolidine-3- carboxylic acid
  MOD_RES (12)..(12): (S)-2-amino-3-(thiophen-3-yl)propanoic acid
  MOD_RES (13)..(13): (S)-2-amino-3-(benzo[b]thiophen-3-yl)propanoic acid
  C-term amino
XDXXDXNAFLXXXA

SEQ ID NO: 1563 - protein, 14 aa, Artificial Sequence
  Description of Artificial Sequence: Synthetic peptide
  N-term Acetic Acid
  MOD_RES (1)..(1): (R)-2-allylpyrrolidine-2-carboxylic acid
  MOD_RES (3)..(3): (S)-2-amino-4,4-dimethylpentanoic acid
  MOD_RES (4)..(4): 2-amino-2-(pent-4-en-1-yl)hept-6-enoic acid
  MOD_RES (6)..(6): (S)-3-(2-amino-2-carboxyethyl)benzoic acid
  MOD_RES (11)..(11): (S)-3-amino-1-((pent-4-en-1-yloxy)carbonyl)pyrrolidine-3- carboxylic acid
  MOD_RES (12)..(12): (S)-2-amino-3-(thiophen-3-yl)propanoic acid
  MOD_RES (13)..(13): (S)-2-amino-3-(benzo[b]thiophen-3-yl)propanoic acid
  C-term amino
XDXXDXSAFLXXXA

SEQ ID NO: 1564 - protein, 14 aa, Artificial Sequence
  Description of Artificial Sequence: Synthetic peptide
  N-term Acetic Acid
  MOD_RES (1)..(1): (R)-2-allylpyrrolidine-2-carboxylic acid
  MOD_RES (3)..(3): (S)-2-amino-4,4-dimethylpentanoic acid
  MOD_RES (4)..(4): 2-amino-2-(pent-4-en-1-yl)hept-6-enoic acid
  MOD_RES (6)..(6): (S)-3-(2-amino-2-carboxyethyl)benzoic acid
  MOD_RES (11)..(11): (S)-3-amino-1-((pent-4-en-1-yloxy)carbonyl)pyrrolidine-3- carboxylic acid
  MOD_RES (12)..(12): (S)-2-amino-3-(thiophen-3-yl)propanoic acid
  MOD_RES (13)..(13): (S)-2-amino-3-(benzo[b]thiophen-3-yl)propanoic acid
  C-term amino
XDXXDXTAFLXXXA

SEQ ID NO: 1565 - protein, 14 aa, Artificial Sequence
  Description of Artificial Sequence: Synthetic peptide
  N-term Acetic Acid
  MOD_RES (1)..(1): (R)-2-allylpyrrolidine-2-carboxylic acid
  MOD_RES (3)..(3): (S)-2-amino-4,4-dimethylpentanoic acid
  MOD_RES (4)..(4): 2-amino-2-(pent-4-en-1-yl)hept-6-enoic acid
  MOD_RES (6)..(6): (S)-3-(2-amino-2-carboxyethyl)benzoic acid
  MOD_RES (11)..(11): (S)-3-amino-1-((pent-4-en-1-yloxy)carbonyl)pyrrolidine-3- carboxylic acid
  MOD_RES (12)..(12): (S)-2-amino-3-(thiophen-3-yl)propanoic acid
  MOD_RES (13)..(13): (S)-2-amino-3-(benzo[b]thiophen-3-yl)propanoic acid
  C-term amino
XDXXDXQAFFXXXA

SEQ ID NO: 1566 - protein, 14 aa, Artificial Sequence
  Description of Artificial Sequence: Synthetic peptide
  N-term Acetic Acid
  MOD_RES (1)..(1): (R)-2-allylpyrrolidine-2-carboxylic acid
  MOD_RES (3)..(3): (S)-2-amino-4,4-dimethylpentanoic acid
  MOD_RES (4)..(4): 2-amino-2-(pent-4-en-1-yl)hept-6-enoic acid
  MOD_RES (6)..(6): (S)-3-(2-amino-2-carboxyethyl)benzoic acid
  MOD_RES (11)..(11): (S)-3-amino-1-((pent-4-en-1-yloxy)carbonyl)pyrrolidine-3- carboxylic acid
  MOD_RES (12)..(12): (S)-2-amino-3-(thiophen-3-yl)propanoic acid
  MOD_RES (13)..(13): (S)-2-amino-3-(benzo[b]thiophen-3-yl)propanoic acid
  C-term amino
XDXXDXQAFAXXXA

SEQ ID NO: 1567 - protein, 14 aa, Artificial Sequence
  Description of Artificial Sequence: Synthetic peptide
  N-term Acetic Acid
  MOD_RES (1)..(1): (R)-2-allylpyrrolidine-2-carboxylic acid
  MOD_RES (3)..(3): (S)-2-amino-4,4-dimethylpentanoic acid
  MOD_RES (4)..(4): 2-amino-2-(pent-4-en-1-yl)hept-6-enoic acid
  MOD_RES (6)..(6): (S)-3-(2-amino-2-carboxyethyl)benzoic acid
  MOD_RES (11)..(11): (S)-3-amino-1-((pent-4-en-1-yloxy)carbonyl)pyrrolidine-3- carboxylic acid
  MOD_RES (12)..(12): (S)-2-amino-3-(thiophen-3-yl)propanoic acid
  MOD_RES (13)..(13): (S)-2-amino-3-(benzo[b]thiophen-3-yl)propanoic acid
  C-term amino
XDXXDXQAFVXXXA

SEQ ID NO: 1568 - protein, 14 aa, Artificial Sequence
  Description of Artificial Sequence: Synthetic peptide
  N-term Acetic Acid
  MOD_RES (1)..(1): (R)-2-allylpyrrolidine-2-carboxylic acid
  MOD_RES (3)..(3): (S)-2-amino-4,4-dimethylpentanoic acid
  MOD_RES (4)..(4): 2-amino-2-(pent-4-en-1-yl)hept-6-enoic acid
  MOD_RES (6)..(6): (S)-3-(2-amino-2-carboxyethyl)benzoic acid
  MOD_RES (11)..(11): (S)-3-amino-1-((pent-4-en-1-yloxy)carbonyl)pyrrolidine-3- carboxylic acid
  MOD_RES (12)..(12): (S)-2-amino-3-(thiophen-3-yl)propanoic acid
  MOD_RES (13)..(13): (S)-2-amino-3-(benzo[b]thiophen-3-yl)propanoic acid
  C-term amino
XDXXDXQAFLXXXV

SEQ ID NO: 1569 - protein, 14 aa, Artificial Sequence
  Description of Artificial Sequence: Synthetic peptide
  N-term Acetic Acid
  MOD_RES (1)..(1): (R)-2-allylpyrrolidine-2-carboxylic acid
  MOD_RES (3)..(3): (S)-2-amino-4,4-dimethylpentanoic acid
  MOD_RES (4)..(4): 2-amino-2-(pent-4-en-1-yl)hept-6-enoic acid
  MOD_RES (6)..(6): (S)-3-(2-amino-2-carboxyethyl)benzoic acid
  MOD_RES (11)..(11): (S)-3-amino-1-((pent-4-en-1-yloxy)carbonyl)pyrrolidine-3- carboxylic acid
  MOD_RES (12)..(12): (S)-2-amino-3-(thiophen-3-yl)propanoic acid
  MOD_RES (13)..(13): (S)-2-amino-3-(benzo[b]thiophen-3-yl)propanoic acid
  C-term amino
XDXXDXQAFLXXXL

SEQ ID NO: 1570 - protein, 14 aa, Artificial Sequence
  Description of Artificial Sequence: Synthetic peptide
  N-term Acetic Acid
  MOD_RES (1)..(1): (R)-2-allylpyrrolidine-2-carboxylic acid
  MOD_RES (3)..(3): (S)-2-amino-4,4-dimethylpentanoic acid
  MOD_RES (4)..(4): 2-amino-2-(pent-4-en-1-yl)hept-6-enoic acid
  MOD_RES (6)..(6): (S)-3-(2-amino-2-carboxyethyl)benzoic acid
  MOD_RES (11)..(11): (S)-3-amino-1-((pent-4-en-1-yloxy)carbonyl)pyrrolidine-3- carboxylic acid
  MOD_RES (12)..(12): (S)-2-amino-3-(2-(trifluoromethyl)phenyl)propanoic acid
  MOD_RES (13)..(13): (S)-2-amino-3-(benzo[b]thiophen-3-yl)propanoic acid
  C-term amino
XDXXDXQAFLXFXA

SEQ ID NO: 1571 - protein, 14 aa, Artificial Sequence
  Description of Artificial Sequence: Synthetic peptide
  N-term Acetic Acid
  MOD_RES (1)..(1): (R)-2-allylpyrrolidine-2-carboxylic acid
  MOD_RES (3)..(3): (S)-2-amino-4,4-dimethylpentanoic acid
  MOD_RES (4)..(4): 2-amino-2-(pent-4-en-1-yl)hept-6-enoic acid
  MOD_RES (6)..(6): (S)-3-(2-amino-2-carboxyethyl)benzoic acid
  MOD_RES (11)..(11): (S)-3-amino-1-((pent-4-en-1-yloxy)carbonyl)pyrrolidine-3- carboxylic acid
  MOD_RES (12)..(12): (S)-2-amino-3-(2-(trifluoromethyl)phenyl)propanoic acid
  MOD_RES (13)..(13): (S)-2-amino-3-(benzo[b]thiophen-3-yl)propanoic acid
  C-term amino
XDXXDXNAFLXFXA

SEQ ID NO: 1572 - protein, 14 aa, Artificial Sequence
  Description of Artificial Sequence: Synthetic peptide
  N-term Acetic Acid
  MOD_RES (1)..(1): (R)-2-allylpyrrolidine-2-carboxylic acid
  MOD_RES (3)..(3): (S)-2-amino-4,4-dimethylpentanoic acid
  MOD_RES (4)..(4): 2-amino-2-(pent-4-en-1-yl)hept-6-enoic acid
  MOD_RES (6)..(6): (S)-3-(2-amino-2-carboxyethyl)benzoic acid
  MOD_RES (11)..(11): (S)-3-amino-1-((pent-4-en-1-yloxy)carbonyl)pyrrolidine-3- carboxylic acid
  MOD_RES (12)..(12): (S)-2-amino-3-(2-(trifluoromethyl)phenyl)propanoic acid
  MOD_RES (13)..(13): (S)-2-amino-3-(benzo[b]thiophen-3-yl)propanoic acid
  C-term amino
XDXXDXSAFLXFXA

SEQ ID NO: 1573 - protein, 14 aa, Artificial Sequence
  Description of Artificial Sequence: Synthetic peptide
  N-term Acetic Acid
  MOD_RES (1)..(1): (R)-2-allylpyrrolidine-2-carboxylic acid
  MOD_RES (3)..(3): (S)-2-amino-4,4-dimethylpentanoic acid
  MOD_RES (4)..(4): 2-amino-2-(pent-4-en-1-yl)hept-6-enoic acid
  MOD_RES (6)..(6): (S)-3-(2-amino-2-carboxyethyl)benzoic acid
  MOD_RES (11)..(11): (S)-3-amino-1-((pent-4-en-1-yloxy)carbonyl)pyrrolidine-3- carboxylic acid
  MOD_RES (12)..(12): (S)-2-amino-3-(2-(trifluoromethyl)phenyl)propanoic acid
  MOD_RES (13)..(13): (S)-2-amino-3-(benzo[b]thiophen-3-yl)propanoic acid
  C-term amino
XDXXDXTAFLXFXA

SEQ ID NO: 1574 - protein, 14 aa, Artificial Sequence
  Description of Artificial Sequence: Synthetic peptide
  N-term Acetic Acid
  MOD_RES (1)..(1): (R)-2-allylpyrrolidine-2-carboxylic acid
  MOD_RES (3)..(3): (S)-2-amino-4,4-dimethylpentanoic acid
  MOD_RES (4)..(4): 2-amino-2-(pent-4-en-1-yl)hept-6-enoic acid
  MOD_RES (6)..(6): (S)-3-(2-amino-2-carboxyethyl)benzoic acid
  MOD_RES (11)..(11): (S)-3-amino-1-((pent-4-en-1-yloxy)carbonyl)pyrrolidine-3- carboxylic acid
  MOD_RES (12)..(12): (S)-2-amino-3-(thiophen-3-yl)propanoic acid
  MOD_RES (13)..(13): (S)-2-amino-3-(benzo[b]thiophen-3-yl)propanoic acid
  MOD_RES (14)..(14): (S)-2-amino-4-(methylsulfonyl)butanoic acid
  C-term amino
XDXXDXAAFLXXXX

SEQ ID NO: 1575 - protein, 14 aa, Artificial Sequence
  Description of Artificial Sequence: Synthetic peptide
  N-term Acetic Acid
  MOD_RES (1)..(1): (R)-2-allylpyrrolidine-2-carboxylic acid
  MOD_RES (3)..(3): (S)-2-amino-4,4-dimethylpentanoic acid
  MOD_RES (4)..(4): 2-amino-2-(pent-4-en-1-yl)hept-6-enoic acid
  MOD_RES (6)..(6): (S)-3-(2-amino-2-carboxyethyl)benzoic acid
  MOD_RES (11)..(11): (S)-3-amino-1-((pent-4-en-1-yloxy)carbonyl)pyrrolidine-3- carboxylic acid
  MOD_RES (12)..(12): (S)-2-amino-3-(2-chlorophenyl)propanoic acid
  MOD_RES (13)..(13): (S)-2-amino-3-(benzo[b]thiophen-3-yl)propanoic acid
  MOD_RES (14)..(14): (S)-2-amino-4-(methylsulfonyl)butanoic acid
  C-term amino
XDXXDXAAFLXFXX

SEQ ID NO: 1576 - protein, 14 aa, Artificial Sequence
  Description of Artificial Sequence: Synthetic peptide
  N-term Acetic Acid
  MOD_RES (1)..(1): (R)-2-allylpyrrolidine-2-carboxylic acid
  MOD_RES (3)..(3): (S)-2-amino-4,4-dimethylpentanoic acid
  MOD_RES (4)..(4): 2-amino-2-(pent-4-en-1-yl)hept-6-enoic acid
  MOD_RES (6)..(6): (S)-3-(2-amino-2-carboxyethyl)benzoic acid
  MOD_RES (11)..(11): (S)-3-amino-1-((pent-4-en-1-yloxy)carbonyl)pyrrolidine-3- carboxylic acid
  MOD_RES (12)..(12): (S)-2-amino-3-(2-(trifluoromethyl)phenyl)propanoic acid
  MOD_RES (13)..(13): (S)-2-amino-3-(benzo[b]thiophen-3-yl)propanoic acid
  MOD_RES (14)..(14): (S)-2-amino-4-(methylsulfonyl)butanoic acid
  C-term amino
XDXXDXAAFLXFXX

SEQ ID NO: 1577 - protein, 14 aa, Artificial Sequence
  Description of Artificial Sequence: Synthetic peptide
  N-term Acetic Acid
  MOD_RES (1)..(1): (R)-2-allylpyrrolidine-2-carboxylic acid
  MOD_RES (3)..(3): (S)-2-amino-4,4-dimethylpentanoic acid
  MOD_RES (4)..(4): 2-amino-2-(pent-4-en-1-yl)hept-6-enoic acid
  MOD_RES (6)..(6): (S)-3-(2-amino-2-carboxyethyl)benzoic acid
  MOD_RES (7)..(7): (S)-2-amino-4-(methylsulfonyl)butanoic acid
  MOD_RES (11)..(11): (S)-3-amino-1-((pent-4-en-1-yloxy)carbonyl)pyrrolidine-3- carboxylic acid
  MOD_RES (12)..(12): (S)-2-amino-3-(thiophen-3-yl)propanoic acid
  MOD_RES (13)..(13): (S)-2-amino-3-(benzo[b]thiophen-3-yl)propanoic acid
  C-term amino
XDXXDXXAFLXXXA

SEQ ID NO: 1578 - protein, 14 aa, Artificial Sequence
  Description of Artificial Sequence: Synthetic peptide
  N-term Acetic Acid
  MOD_RES (1)..(1): (R)-2-allylpyrrolidine-2-carboxylic acid
  MOD_RES (3)..(3): (S)-2-amino-3-cyclohexylpropanoic acid
  MOD_RES (4)..(4): 2-amino-2-(pent-4-en-1-yl)hept-6-enoic acid
  MOD_RES (7)..(7): N6-isopropyl-L-lysine
  MOD_RES (11)..(11): (S)-3-amino-1-((pent-4-en-1-yloxy)carbonyl)pyrrolidine-3- carboxylic acid
  MOD_RES (13)..(13): (S)-2-amino-3-(benzo[b]thiophen-3-yl)propanoic acid
  C-term amino
XNXXDQKAFNXFXA

SEQ ID NO: 1579 - protein, 14 aa, Artificial Sequence
  Description of Artificial Sequence: Synthetic peptide
  N-term Acetic Acid
  MOD_RES (1)..(1): (R)-2-allylpyrrolidine-2-carboxylic acid
  MOD_RES (3)..(3): (S)-2-amino-3-cyclohexylpropanoic acid
  MOD_RES (4)..(4): 2-amino-2-(pent-4-en-1-yl)hept-6-enoic acid
  MOD_RES (11)..(11): (S)-3-amino-1-((pent-4-en-1-yloxy)carbonyl)pyrrolidine-3- carboxylic acid
  MOD_RES (13)..(13): (S)-2-amino-3-(benzo[b]thiophen-3-yl)propanoic acid
  MOD_RES (14)..(14): L-homoserine
  C-term amino
XNXXDQHAFNXFXS

SEQ ID NO: 1580 - protein, 14 aa, Artificial Sequence
  Description of Artificial Sequence: Synthetic peptide
  N-term Acetic Acid
  MOD_RES (1)..(1): (R)-2-allylpyrrolidine-2-carboxylic acid
  MOD_RES (3)..(3): (S)-2-amino-3-cyclohexylpropanoic acid
  MOD_RES (4)..(4): 2-amino-2-(pent-4-en-1-yl)hept-6-enoic acid
  MOD_RES (11)..(11): (S)-3-amino-1-((pent-4-en-1-yloxy)carbonyl)pyrrolidine-3- carboxylic acid
  MOD_RES (13)..(13): (S)-2-amino-3-(benzo[b]thiophen-3-yl)propanoic acid
  MOD_RES (14)..(14): L-homoserine
  C-term amino
XNXXDQQAFNXFXS

SEQ ID NO: 1581 - protein, 14 aa, Artificial Sequence
  Description of Artificial Sequence: Synthetic peptide
  N-term Acetic Acid
  MOD_RES (1)..(1): (R)-2-allylpyrrolidine-2-carboxylic acid
  MOD_RES (3)..(3): (S)-2-amino-3-cyclohexylpropanoic acid
  MOD_RES (4)..(4): 2-amino-2-(pent-4-en-1-yl)hept-6-enoic acid
  MOD_RES (7)..(7): N6-isopropyl-L-lysine
  MOD_RES (11)..(11): (S)-3-amino-1-((pent-4-en-1-yloxy)carbonyl)pyrrolidine-3- carboxylic acid
  MOD_RES (13)..(13): (S)-2-amino-3-(benzo[b]thiophen-3-yl)propanoic acid
  C-term amino
XNXXDQKAFNXFXF

SEQ ID NO: 1582 - protein, 14 aa, Artificial Sequence
  Description of Artificial Sequence: Synthetic peptide
  N-term Acetic Acid
  MOD_RES (1)..(1): (R)-2-allylpyrrolidine-2-carboxylic acid
  MOD_RES (3)..(3): (S)-2-amino-3-cyclohexylpropanoic acid
  MOD_RES (4)..(4): 2-amino-2-(pent-4-en-1-yl)hept-6-enoic acid
  MOD_RES (11)..(11): (S)-3-amino-1-((pent-4-en-1-yloxy)carbonyl)pyrrolidine-3- carboxylic acid
  MOD_RES (13)..(13): (S)-2-amino-3-(benzo[b]thiophen-3-yl)propanoic acid
  C-term amino
XNXXDQHAFNXFXA

SEQ ID NO: 1583 - protein, 14 aa, Artificial Sequence
  Description of Artificial Sequence: Synthetic peptide
  N-term Acetic Acid
  MOD_RES (1)..(1): (R)-2-allylpyrrolidine-2-carboxylic acid
  MOD_RES (3)..(3): (S)-2-amino-3-cyclohexylpropanoic acid
  MOD_RES (4)..(4): 2-amino-2-(pent-4-en-1-yl)hept-6-enoic acid
  MOD_RES (11)..(11): (S)-3-amino-1-((pent-4-en-1-yloxy)carbonyl)pyrrolidine-3- carboxylic acid
  MOD_RES (13)..(13): (S)-2-amino-3-(benzo[b]thiophen-3-yl)propanoic acid
  C-term amino
XNXXDQQAFNXFXA

SEQ ID NO: 1584 - protein, 14 aa, Artificial Sequence
  Description of Artificial Sequence: Synthetic peptide
  N-term Acetic Acid
  MOD_RES (1)..(1): (R)-2-allylpyrrolidine-2-carboxylic acid
  MOD_RES (3)..(3): (S)-2-amino-3-cyclohexylpropanoic acid
  MOD_RES (4)..(4): 2-amino-2-(pent-4-en-1-yl)hept-6-enoic acid
  MOD_RES (7)..(7): N6-isopropyl-L-lysine
  MOD_RES (11)..(11): (S)-3-amino-1-((pent-4-en-1-yloxy)carbonyl)pyrrolidine-3- carboxylic acid
  MOD_RES (12)..(12): (S)-2-amino-3-(thiazol-4-yl)propanoic acid
  MOD_RES (13)..(13): (S)-2-amino-3-(benzo[b]thiophen-3-yl)propanoic acid
  MOD_RES (14)..(14): L-homoserine
  C-term amino
XNXXDQKAFNXXXS

SEQ ID NO: 1585 - protein, 14 aa, Artificial Sequence
  Description of Artificial Sequence: Synthetic peptide
  N-term Acetic Acid
  MOD_RES (1)..(1): (R)-2-allylpyrrolidine-2-carboxylic acid
  MOD_RES (3)..(3): (S)-2-amino-3-cyclohexylpropanoic acid
  MOD_RES (4)..(4): 2-amino-2-(pent-4-en-1-yl)hept-6-enoic acid
  MOD_RES (7)..(7): N6-isopropyl-L-lysine
  MOD_RES (9)..(9): (S)-2-amino-3-(thiazol-4-yl)propanoic acid
  MOD_RES (11)..(11): (S)-3-amino-1-((pent-4-en-1-yloxy)carbonyl)pyrrolidine-3- carboxylic acid
  MOD_RES (13)..(13): (S)-2-amino-3-(benzo[b]thiophen-3-yl)propanoic acid
  MOD_RES (14)..(14): L-homoserine
  C-term amino
XNXXDQKAXNXFXS

SEQ ID NO: 1586 - protein, 13 aa, Artificial Sequence
  Description of Artificial Sequence: Synthetic peptide
  N-term Acetic Acid
  MOD_RES (1)..(1): (R)-2-allylpyrrolidine-2-carboxylic acid
  MOD_RES (3)..(3): (S)-2-amino-3-cyclohexylpropanoic acid
  MOD_RES (4)..(4): 2-amino-2-(pent-4-en-1-yl)hept-6-enoic acid
  MOD_RES (7)..(7): N6-isopropyl-L-lysine
  MOD_RES (11)..(11): (S)-3-amino-1-((pent-4-en-1-yloxy)carbonyl)pyrrolidine-3- carboxylic acid
  MOD_RES (13)..(13): (S)-2-amino-3-(benzo[b]thiophen-3-yl)propanoic acid
  C-term amino
XNXXDQKAFNXFX

SEQ ID NO: 1587 - protein, 14 aa, Artificial Sequence
  Description of Artificial Sequence: Synthetic peptide
  N-term Acetic Acid
  MOD_RES (1)..(1): (R)-2-allylpyrrolidine-2-carboxylic acid
  MOD_RES (3)..(3): (S)-2-amino-3-cyclohexylpropanoic acid
  MOD_RES (4)..(4): 2-amino-2-(pent-4-en-1-yl)hept-6-enoic acid
  MOD_RES (7)..(7): N6-isopropyl-L-lysine
  MOD_RES (11)..(11): (S)-3-amino-1-((pent-4-en-1-yloxy)carbonyl)pyrrolidine-3- carboxylic acid
  MOD_RES (12)..(12): (S)-2-amino-3-(thiophen-3-yl)propanoic acid
  MOD_RES (13)..(13): (S)-2-amino-3-(benzo[b]thiophen-3-yl)propanoic acid
  MOD_RES (14)..(14): L-homoserine
  C-term amino
XNXXDQKAFNXXXS

SEQ ID NO: 1588 - protein, 14 aa, Artificial Sequence
  Description of Artificial Sequence: Synthetic peptide
  N-term Acetic Acid
  MOD_RES (1)..(1): (R)-2-allylpyrrolidine-2-carboxylic acid
  MOD_RES (3)..(3): (S)-2-amino-3-cyclohexylpropanoic acid
  MOD_RES (4)..(4): 2-amino-2-(pent-4-en-1-yl)hept-6-enoic acid
  MOD_RES (7)..(7): N6-isopropyl-L-lysine
  MOD_RES (11)..(11): (S)-3-amino-1-((pent-4-en-1-yloxy)carbonyl)pyrrolidine-3- carboxylic acid
  MOD_RES (12)..(12): (S)-2-amino-3-(thiophen-2-yl)propanoic acid
  MOD_RES (13)..(13): (S)-2-amino-3-(benzo[b]thiophen-3-yl)propanoic acid
  MOD_RES (14)..(14): L-homoserine
  C-term amino
XNXXDQKAFNXXXS

SEQ ID NO: 1589 - protein, 14 aa, Artificial Sequence
  Description of Artificial Sequence: Synthetic peptide
  N-term Acetic Acid
  MOD_RES (1)..(1): (R)-2-allylpyrrolidine-2-carboxylic acid
  MOD_RES (3)..(3): (S)-2-amino-4,4-dimethylpentanoic acid
  MOD_RES (4)..(4): 2-amino-2-(pent-4-en-1-yl)hept-6-enoic acid
  MOD_RES (6)..(6): (S)-2-amino-4-(4-(2-carboxyethyl)-1H-1,2,3-triazol-1-yl) butanoic acid
  MOD_RES (11)..(11): (S)-3-amino-1-((pent-4-en-1-yloxy)carbonyl)pyrrolidine-3- carboxylic acid
  MOD_RES (12)..(12): (S)-2-amino-3-(thiophen-3-yl)propanoic acid
  MOD_RES (13)..(13): (S)-2-amino-3-(benzo[b]thiophen-3-yl)propanoic acid
  C-term amino
XDXXDXAAFLXXXQ

SEQ ID NO: 1590 - protein, 14 aa, Artificial Sequence
  Description of Artificial Sequence: Synthetic peptide
  N-term Acetic Acid
  MOD_RES (1)..(1): (R)-2-allylpyrrolidine-2-carboxylic acid
  MOD_RES (3)..(3): (S)-2-amino-4,4-dimethylpentanoic acid
  MOD_RES (4)..(4): 2-amino-2-(pent-4-en-1-yl)hept-6-enoic acid
  MOD_RES (6)..(6): (S)-2-amino-4-(4-(2-carboxy-2-methylpropyl)-1H-1,2,3-triazol-1-yl) butanoic acid
  MOD_RES (11)..(11): (S)-3-amino-1-((pent-4-en-1-yloxy)carbonyl)pyrrolidine-3- carboxylic acid
  MOD_RES (12)..(12): (S)-2-amino-3-(thiophen-3-yl)propanoic acid
  MOD_RES (13)..(13): (S)-2-amino-3-(benzo[b]thiophen-3-yl)propanoic acid
  C-term amino
XDXXDXAAFLXXXQ

SEQ ID NO: 1591 - protein, 14 aa, Artificial Sequence
  Description of Artificial Sequence: Synthetic peptide
  N-term Acetic Acid
  MOD_RES (1)..(1): (R)-2-allylpyrrolidine-2-carboxylic acid
  MOD_RES (3)..(3): (S)-2-amino-4,4-dimethylpentanoic acid
  MOD_RES (4)..(4): 2-amino-2-(pent-4-en-1-yl)hept-6-enoic acid
  MOD_RES (6)..(6): (S)-2-amino-4-(4-(carboxymethyl)-1H-1,2,3-triazol-1-yl) butanoic acid
  MOD_RES (11)..(11): (S)-3-amino-1-((pent-4-en-1-yloxy)carbonyl)pyrrolidine-3- carboxylic acid
  MOD_RES (12)..(12): (S)-2-amino-3-(thiophen-3-yl)propanoic acid
  MOD_RES (13)..(13): (S)-2-amino-3-(benzo[b]thiophen-3-yl)propanoic acid
  C-term amino
XDXXDXAAFLXXXQ

SEQ ID NO: 1592 - protein, 14 aa, Artificial Sequence
  Description of Artificial Sequence: Synthetic peptide
  N-term Acetic Acid
  MOD_RES (1)..(1): (R)-2-allylpyrrolidine-2-carboxylic acid
  MOD_RES (3)..(3): (S)-2-amino-4,4-dimethylpentanoic acid
  MOD_RES (4)..(4): 2-amino-2-(pent-4-en-1-yl)hept-6-enoic acid
  MOD_RES (6)..(6): (S)-2-amino-4-(4-(2-carboxypropan-2-yl)-1H-1,2,3-triazol-1-yl) butanoic acid
  MOD_RES (11)..(11): (S)-3-amino-1-((pent-4-en-1-yloxy)carbonyl)pyrrolidine-3- carboxylic acid
  MOD_RES (12)..(12): (S)-2-amino-3-(thiophen-3-yl)propanoic acid
  MOD_RES (13)..(13): (S)-2-amino-3-(benzo[b]thiophen-3-yl)propanoic acid
  C-term amino
XDXXDXAAFLXXXQ

SEQ ID NO: 1593 - protein, 14 aa, Artificial Sequence
  Description of Artificial Sequence: Synthetic peptide
  N-term Acetic Acid
  MOD_RES (1)..(1): (R)-2-allylpyrrolidine-2-carboxylic acid
  MOD_RES (3)..(3): (S)-2-amino-4,4-dimethylpentanoic acid
  MOD_RES (4)..(4): 2-amino-2-(pent-4-en-1-yl)hept-6-enoic acid
  MOD_RES (6)..(6): (S)-2-(1-(3-amino-3-carboxypropyl)-1H-1,2,3-triazol-4-yl) benzoic acid
  MOD_RES (11)..(11): (S)-3-amino-1-((pent-4-en-1-yloxy)carbonyl)pyrrolidine-3- carboxylic acid
  MOD_RES (12)..(12): (S)-2-amino-3-(thiophen-3-yl)propanoic acid
  MOD_RES (13)..(13): (S)-2-amino-3-(benzo[b]thiophen-3-yl)propanoic acid
  C-term amino
XDXXDXAAFLXXXQ

SEQ ID NO: 1594 - protein, 14 aa, Artificial Sequence
  Description of Artificial Sequence: Synthetic peptide
  N-term Acetic Acid
  MOD_RES (1)..(1): (R)-2-allylpyrrolidine-2-carboxylic acid
  MOD_RES (3)..(3): (S)-2-amino-4,4-dimethylpentanoic acid
  MOD_RES (4)..(4): 2-amino-2-(pent-4-en-1-yl)hept-6-enoic acid
  MOD_RES (6)..(6): (S)-2-amino-3-(4-(2-carboxyethyl)-1H-1,2,3-triazol-1-yl) propanoic acid
  MOD_RES (11)..(11): (S)-3-amino-1-((pent-4-en-1-yloxy)carbonyl)pyrrolidine-3- carboxylic acid
  MOD_RES (12)..(12): (S)-2-amino-3-(thiophen-3-yl)propanoic acid
  MOD_RES (13)..(13): (S)-2-amino-3-(benzo[b]thiophen-3-yl)propanoic acid
  C-term amino
XDXXDXAAFLXXXQ

SEQ ID NO: 1595 - protein, 14 aa, Artificial Sequence
  Description of Artificial Sequence: Synthetic peptide
  N-term Acetic Acid
  MOD_RES (1)..(1): (R)-2-allylpyrrolidine-2-carboxylic acid
  MOD_RES (3)..(3): (S)-2-amino-4,4-dimethylpentanoic acid
  MOD_RES (4)..(4): 2-amino-2-(pent-4-en-1-yl)hept-6-enoic acid
  MOD_RES (6)..(6): (S)-3-(1-(2-amino-2-carboxyethyl)-1H-1,2,3-triazol-4-yl)-2,2 -dimethylpropanoic acid
  MOD_RES (11)..(11): (S)-3-amino-1-((pent-4-en-1-yloxy)carbonyl)pyrrolidine-3- carboxylic acid
  MOD_RES (12)..(12): (S)-2-amino-3-(thiophen-3-yl)propanoic acid
  MOD_RES (13)..(13): (S)-2-amino-3-(benzo[b]thiophen-3-yl)propanoic acid
  C-term amino
XDXXDXAAFLXXXQ

SEQ ID NO: 1596 - protein, 14 aa, Artificial Sequence
  Description of Artificial Sequence: Synthetic peptide
  N-term Acetic Acid
  MOD_RES (1)..(1): (R)-2-allylpyrrolidine-2-carboxylic acid
  MOD_RES (3)..(3): (S)-2-amino-4,4-dimethylpentanoic acid
  MOD_RES (4)..(4): 2-amino-2-(pent-4-en-1-yl)hept-6-enoic acid
  MOD_RES (6)..(6): (S)-2-amino-3-(4-(carboxymethyl)-1H-1,2,3-triazol-1-yl) propanoic acid
  MOD_RES (11)..(11): (S)-3-amino-1-((pent-4-en-1-yloxy)carbonyl)pyrrolidine-3- carboxylic acid
  MOD_RES (12)..(12): (S)-2-amino-3-(thiophen-3-yl)propanoic acid
  MOD_RES (13)..(13): (S)-2-amino-3-(benzo[b]thiophen-3-yl)propanoic acid
  C-term amino
XDXXDXAAFLXXXQ

SEQ ID NO: 1597 - protein, 14 aa, Artificial Sequence
  Description of Artificial Sequence: Synthetic peptide
  N-term Acetic Acid
  MOD_RES (1)..(1): (R)-2-allylpyrrolidine-2-carboxylic acid
  MOD_RES (3)..(3): (S)-2-amino-4,4-dimethylpentanoic acid
  MOD_RES (4)..(4): 2-amino-2-(pent-4-en-1-yl)hept-6-enoic acid
  MOD_RES (6)..(6): (S)-2-amino-3-(4-(2-carboxypropan-2-yl)-1H-1,2,3-triazol-1-yl) propanoic acid
  MOD_RES (11)..(11): (S)-3-amino-1-((pent-4-en-1-yloxy)carbonyl)pyrrolidine-3- carboxylic acid
  MOD_RES (12)..(12): (S)-2-amino-3-(thiophen-3-yl)propanoic acid
  MOD_RES (13)..(13): (S)-2-amino-3-(benzo[b]thiophen-3-yl)propanoic acid
  C-term amino
XDXXDXAAFLXXXQ

SEQ ID NO: 1598 - protein, 14 aa, Artificial Sequence
  Description of Artificial Sequence: Synthetic peptide
  N-term Acetic Acid
  MOD_RES (1)..(1): (R)-2-allylpyrrolidine-2-carboxylic acid
  MOD_RES (3)..(3): (S)-2-amino-4,4-dimethylpentanoic acid
  MOD_RES (4)..(4): 2-amino-2-(pent-4-en-1-yl)hept-6-enoic acid
  MOD_RES (6)..(6): (S)-2-(1-(2-amino-2-carboxyethyl)-1H-1,2,3-triazol-4-yl) benzoic acid
  MOD_RES (11)..(11): (S)-3-amino-1-((pent-4-en-1-yloxy)carbonyl)pyrrolidine-3- carboxylic acid
  MOD_RES (12)..(12): (S)-2-amino-3-(thiophen-3-yl)propanoic acid
  MOD_RES (13)..(13): (S)-2-amino-3-(benzo[b]thiophen-3-yl)propanoic acid
  C-term amino
XDXXDXAAFLXXXQ

SEQ ID NO: 1599 - protein, 14 aa, Artificial Sequence
  Description of Artificial Sequence: Synthetic peptide
  N-term Acetic Acid
  MOD_RES (1)..(1): (R)-2-allylpyrrolidine-2-carboxylic acid
  MOD_RES (3)..(3): (S)-2-amino-4,4-dimethylpentanoic acid
  MOD_RES (4)..(4): 2-amino-2-(pent-4-en-1-yl)hept-6-enoic acid
  MOD_RES (6)..(6): (S)-5-amino-2-((2-amino-2-carboxyethyl)amino)benzoic acid
  MOD_RES (11)..(11): (S)-3-amino-1-((pent-4-en-1-yloxy)carbonyl)pyrrolidine-3- carboxylic acid
  MOD_RES (12)..(12): (S)-2-amino-3-(thiophen-3-yl)propanoic acid
  MOD_RES (13)..(13): (S)-2-amino-3-(benzo[b]thiophen-3-yl)propanoic acid
  C-term amino
XDXXDXAAFLXXXQ

SEQ ID NO: 1600 - protein, 14 aa, Artificial Sequence
  Description of Artificial Sequence: Synthetic peptide
  N-term Acetic Acid
  MOD_RES (1)..(1): (R)-2-allylpyrrolidine-2-carboxylic acid
  MOD_RES (3)..(3): (S)-2-amino-4,4-dimethylpentanoic acid
  MOD_RES (4)..(4): 2-amino-2-(pent-4-en-1-yl)hept-6-enoic acid
  MOD_RES (6)..(6): (S)-3-(2-amino-2-carboxyethyl)benzoic acid
  MOD_RES (11)..(11): (S)-3-amino-1-((pent-4-en-1-yloxy)carbonyl)pyrrolidine-3- carboxylic acid
  MOD_RES (12)..(12): (S)-2-amino-3-(thiophen-3-yl)propanoic acid
  MOD_RES (13)..(13): (S)-2-amino-3-(benzo[b]thiophen-3-yl)propanoic acid
  MOD_RES (14)..(14): D-glutamine
  C-term amino
XDXXDXAAFLXXXQ

SEQ ID NO: 1601 - protein, 14 aa, Artificial Sequence
  Description of Artificial Sequence: Synthetic peptide
  N-term Acetic Acid
  MOD_RES (1)..(1): (R)-2-allylpyrrolidine-2-carboxylic acid
  MOD_RES (3)..(3): (S)-2-amino-4,4-dimethylpentanoic acid
  MOD_RES (4)..(4): 2-amino-2-(pent-4-en-1-yl)hept-6-enoic acid
  MOD_RES (6)..(6): (S)-3-(2-amino-2-carboxyethyl)benzoic acid
  MOD_RES (11)..(11): (S)-3-amino-1-((pent-4-en-1-yloxy)carbonyl)pyrrolidine-3- carboxylic acid
  MOD_RES (12)..(12): (S)-2-amino-3-(2-(trifluoromethyl)phenyl)propanoic acid
  MOD_RES (13)..(13): (S)-2-amino-3-(benzo[b]thiophen-3-yl)propanoic acid
  MOD_RES (14)..(14): D-glutamine
  C-term amino
XDXXDXAAFLXFXQ

SEQ ID NO: 1602 - protein, 14 aa, Artificial Sequence
  Description of Artificial Sequence: Synthetic peptide
  N-term Acetic Acid
  MOD_RES (1)..(1): (R)-2-allylpyrrolidine-2-carboxylic acid
  MOD_RES (3)..(3): (S)-2-amino-4,4-dimethylpentanoic acid
  MOD_RES (4)..(4): 2-amino-2-(pent-4-en-1-yl)hept-6-enoic acid
  MOD_RES (6)..(6): (S)-3-(2-amino-2-carboxyethyl)benzoic acid
  MOD_RES (11)..(11): (S)-3-amino-1-((pent-4-en-1-yloxy)carbonyl)pyrrolidine-3- carboxylic acid
  MOD_RES (12)..(12): (S)-2-amino-3-(thiophen-3-yl)propanoic acid
  MOD_RES (13)..(13): (S)-2-amino-3-(benzo[b]thiophen-3-yl)propanoic acid
  MOD_RES (14)..(14): D-alanine
  C-term amino
XDXXDXAAFLXXXA

SEQ ID NO: 1603 - protein, 14 aa, Artificial Sequence
  Description of Artificial Sequence: Synthetic peptide
  N-term Acetic Acid
  MOD_RES (1)..(1): (R)-2-allylpyrrolidine-2-carboxylic acid
  MOD_RES (3)..(3): (S)-2-amino-4,4-dimethylpentanoic acid
  MOD_RES (4)..(4): 2-amino-2-(pent-4-en-1-yl)hept-6-enoic acid
  MOD_RES (6)..(6): (S)-3-(2-amino-2-carboxyethyl)benzoic acid
  MOD_RES (11)..(11): (S)-3-amino-1-((pent-4-en-1-yloxy)carbonyl)pyrrolidine-3- carboxylic acid
  MOD_RES (12)..(12): (S)-2-amino-3-(2-(trifluoromethyl)phenyl)propanoic acid
  MOD_RES (13)..(13): (S)-2-amino-3-(benzo[b]thiophen-3-yl)propanoic acid
  MOD_RES (14)..(14): D-alanine
  C-term amino
XDXXDXAAFLXFXA

SEQ ID NO: 1604 - protein, 14 aa, Artificial Sequence
  Description of Artificial Sequence: Synthetic peptide
  N-term Acetic Acid
  MOD_RES (1)..(1): (R)-2-allylpyrrolidine-2-carboxylic acid
  MOD_RES (3)..(3): (S)-2-amino-4,4-dimethylpentanoic acid
  MOD_RES (4)..(4): 2-amino-2-(pent-4-en-1-yl)hept-6-enoic acid
  MOD_RES (6)..(6): (S)-3-(2-amino-2-carboxyethyl)benzoic acid
  MOD_RES (11)..(11): (S)-3-amino-1-((pent-4-en-1-yloxy)carbonyl)pyrrolidine-3- carboxylic acid
  MOD_RES (12)..(12): (S)-2-amino-3-(thiophen-3-yl)propanoic acid
  MOD_RES (13)..(13): (S)-2-amino-3-(benzo[b]thiophen-3-yl)propanoic acid
  MOD_RES (14)..(14): D-glutamine
  C-term amino
XDXXDXAAFFXXXQ

SEQ ID NO: 1605 - protein, 14 aa, Artificial Sequence
  Description of Artificial Sequence: Synthetic peptide
  N-term Acetic Acid
  MOD_RES (1)..(1): (R)-2-allylpyrrolidine-2-carboxylic acid
  MOD_RES (3)..(3): (S)-2-amino-4,4-dimethylpentanoic acid
  MOD_RES (4)..(4): 2-amino-2-(pent-4-en-1-yl)hept-6-enoic acid
  MOD_RES (6)..(6): (S)-3-(2-amino-2-carboxyethyl)benzoic acid
  MOD_RES (11)..(11): (S)-3-amino-1-((pent-4-en-1-yloxy)carbonyl)pyrrolidine-3- carboxylic acid
  MOD_RES (12)..(12): (S)-2-amino-3-(2-(trifluoromethyl)phenyl)propanoic acid
  MOD_RES (13)..(13): (S)-2-amino-3-(benzo[b]thiophen-3-yl)propanoic acid
  MOD_RES (14)..(14): D-glutamine
  C-term amino
XDXXDXAAFFXFXQ

SEQ ID NO: 1606 - protein, 14 aa, Artificial Sequence
  Description of Artificial Sequence: Synthetic peptide
  N-term Acetic Acid
  MOD_RES (1)..(1): (R)-2-allylpyrrolidine-2-carboxylic acid
  MOD_RES (3)..(3): (S)-2-amino-4,4-dimethylpentanoic acid
  MOD_RES (4)..(4): 2-amino-2-(pent-4-en-1-yl)hept-6-enoic acid
  MOD_RES (6)..(6): (S)-3-(2-amino-2-carboxyethyl)benzoic acid
  MOD_RES (11)..(11): (S)-3-amino-1-((pent-4-en-1-yloxy)carbonyl)pyrrolidine-3- carboxylic acid
  MOD_RES (12)..(12): (S)-2-amino-3-(thiophen-3-yl)propanoic acid
  MOD_RES (13)..(13): (S)-2-amino-3-(benzo[b]thiophen-3-yl)propanoic acid
  MOD_RES (14)..(14): D-alanine
  C-term amino
XDXXDXAAFFXXXA

SEQ ID NO: 1607 - protein, 14 aa, Artificial Sequence
  Description of Artificial Sequence: Synthetic peptide
  N-term Acetic Acid
  MOD_RES (1)..(1): (R)-2-allylpyrrolidine-2-carboxylic acid
  MOD_RES (3)..(3): (S)-2-amino-4,4-dimethylpentanoic acid
  MOD_RES (4)..(4): 2-amino-2-(pent-4-en-1-yl)hept-6-enoic acid
  MOD_RES (6)..(6): (S)-3-(2-amino-2-carboxyethyl)benzoic acid
  MOD_RES (11)..(11): (S)-3-amino-1-((pent-4-en-1-yloxy)carbonyl)pyrrolidine-3- carboxylic acid
  MOD_RES (12)..(12): (S)-2-amino-3-(2-(trifluoromethyl)phenyl)propanoic acid
  MOD_RES (13)..(13): (S)-2-amino-3-(benzo[b]thiophen-3-yl)propanoic acid
  MOD_RES (14)..(14): D-alanine
  C-term amino
XDXXDXAAFFXFXA

SEQ ID NO: 1608 - protein, 14 aa, Artificial Sequence
  Description of Artificial Sequence: Synthetic peptide
  N-term Acetic Acid
  MOD_RES (1)..(1): (R)-2-allylpyrrolidine-2-carboxylic acid
  MOD_RES (3)..(3): (S)-2-amino-4,4-dimethylpentanoic acid
  MOD_RES (4)..(4): 2-amino-2-(pent-4-en-1-yl)hept-6-enoic acid
  MOD_RES (6)..(6): (S)-3-(2-amino-2-carboxyethyl)benzoic acid
  MOD_RES (8)..(8): D-alanine
  MOD_RES (11)..(11): (S)-3-amino-1-((pent-4-en-1-yloxy)carbonyl)pyrrolidine-3- carboxylic acid
  MOD_RES (12)..(12): (S)-2-amino-3-(thiophen-3-yl)propanoic acid
  MOD_RES (13)..(13): (S)-2-amino-3-(benzo[b]thiophen-3-yl)propanoic acid
  C-term amino
XDXXDXAAFLXXXA

SEQ ID NO: 1609 - protein, 14 aa, Artificial Sequence
  Description of Artificial Sequence: Synthetic peptide
  N-term Acetic Acid
  MOD_RES (1)..(1): (R)-2-allylpyrrolidine-2-carboxylic acid
  MOD_RES (3)..(3): (S)-2-amino-4,4-dimethylpentanoic acid
  MOD_RES (4)..(4): 2-amino-2-(pent-4-en-1-yl)hept-6-enoic acid
  MOD_RES (6)..(6): (S)-3-(2-amino-2-carboxyethyl)benzoic acid
  MOD_RES (8)..(8): D-alanine
  MOD_RES (11)..(11): (S)-3-amino-1-((pent-4-en-1-yloxy)carbonyl)pyrrolidine-3- carboxylic acid
  MOD_RES (12)..(12): (S)-2-amino-3-(2-(trifluoromethyl)phenyl)propanoic acid
  MOD_RES (13)..(13): (S)-2-amino-3-(benzo[b]thiophen-3-yl)propanoic acid
  C-term amino
XDXXDXAAFLXFXA

SEQ ID NO: 1610 - protein, 14 aa, Artificial Sequence
  Description of Artificial Sequence: Synthetic peptide
  N-term Acetic Acid
  MOD_RES (1)..(1): (R)-2-allylpyrrolidine-2-carboxylic acid
  MOD_RES (3)..(3): (S)-2-amino-4,4-dimethylpentanoic acid
  MOD_RES (4)..(4): 2-amino-2-(pent-4-en-1-yl)hept-6-enoic acid
  MOD_RES (6)..(6): (S)-3-(2-amino-2-carboxyethyl)benzoic acid
  MOD_RES (8)..(8): D-alanine
  MOD_RES (11)..(11): (S)-3-amino-1-((pent-4-en-1-yloxy)carbonyl)pyrrolidine-3- carboxylic acid
  MOD_RES (12)..(12): (S)-2-amino-3-(thiophen-3-yl)propanoic acid
  MOD_RES (13)..(13): (S)-2-amino-3-(benzo[b]thiophen-3-yl)propanoic acid
  MOD_RES (14)..(14): D-alanine
  C-term amino
XDXXDXAAFLXXXA

SEQ ID NO: 1611 - protein, 14 aa, Artificial Sequence
  Description of Artificial Sequence: Synthetic peptide
  N-term Acetic Acid
  MOD_RES (1)..(1): (R)-2-allylpyrrolidine-2-carboxylic acid
  MOD_RES (3)..(3): (S)-2-amino-4,4-dimethylpentanoic acid
  MOD_RES (4)..(4): 2-amino-2-(pent-4-en-1-yl)hept-6-enoic acid
  MOD_RES (6)..(6): (S)-3-(2-amino-2-carboxyethyl)benzoic acid
  MOD_RES (8)..(8): D-alanine
  MOD_RES (11)..(11): (S)-3-amino-1-((pent-4-en-1-yloxy)carbonyl)pyrrolidine-3- carboxylic acid
  MOD_RES (12)..(12): (S)-2-amino-3-(2-(trifluoromethyl)phenyl)propanoic acid
  MOD_RES (13)..(13): (S)-2-amino-3-(benzo[b]thiophen-3-yl)propanoic acid
  MOD_RES (14)..(14): D-alanine
  C-term amino
XDXXDXAAFLXFXA

SEQ ID NO: 1612 - protein, 14 aa, Artificial Sequence
  Description of Artificial Sequence: Synthetic peptide
  N-term Acetic Acid
  MOD_RES (1)..(1): (R)-2-allylpyrrolidine-2-carboxylic acid
  MOD_RES (3)..(3): (S)-2-amino-3-cyclohexylpropanoic acid
  MOD_RES (4)..(4): 2-amino-2-(pent-4-en-1-yl)hept-6-enoic acid
  MOD_RES (7)..(7): N6-isopropyl-L-lysine
  MOD_RES (10)..(10): N6-isopropyl-L-lysine
  MOD_RES (11)..(11): (S)-3-amino-1-((pent-4-en-1-yloxy)carbonyl)pyrrolidine-3- carboxylic acid
  MOD_RES (13)..(13): (S)-2-amino-3-(benzo[b]thiophen-3-yl)propanoic acid
  MOD_RES (14)..(14): L-homoserine
  C-term amino
XNXXDQKAFKXFXS

SEQ ID NO: 1613 - protein, 14 aa, Artificial Sequence
  Description of Artificial Sequence: Synthetic peptide
  N-term Acetic Acid
  MOD_RES (1)..(1): (R)-2-allylpyrrolidine-2-carboxylic acid
  MOD_RES (3)..(3): (S)-2-amino-3-cyclohexylpropanoic acid
  MOD_RES (4)..(4): 2-amino-2-(pent-4-en-1-yl)hept-6-enoic acid
  MOD_RES (7)..(7): N6-isopropyl-L-lysine
  MOD_RES (11)..(11): (S)-3-amino-1-((pent-4-en-1-yloxy)carbonyl)pyrrolidine-3- carboxylic acid
  MOD_RES (13)..(13): (S)-2-amino-3-(benzo[b]thiophen-3-yl)propanoic acid
  MOD_RES (14)..(14): L-homoserine
  C-term amino
XSXXDQKAFNXFXS

SEQ ID NO: 1614 - protein, 14 aa, Artificial Sequence
  Description of Artificial Sequence: Synthetic peptide
  N-term Acetic Acid
  MOD_RES (1)..(1): (R)-2-allylpyrrolidine-2-carboxylic acid
  MOD_RES (3)..(3): (S)-2-amino-3-cyclohexylpropanoic acid
  MOD_RES (4)..(4): 2-amino-2-(pent-4-en-1-yl)hept-6-enoic acid
  MOD_RES (7)..(7): N6-isopropyl-L-lysine
  MOD_RES (11)..(11): (S)-3-amino-1-((pent-4-en-1-yloxy)carbonyl)pyrrolidine-3- carboxylic acid
  MOD_RES (13)..(13): (S)-2-amino-3-(benzo[b]thiophen-3-yl)propanoic acid
  MOD_RES (14)..(14): L-homoserine
  C-term amino
XTXXDQKAFNXFXS

SEQ ID NO: 1615 - protein, 14 aa, Artificial Sequence
  Description of Artificial Sequence: Synthetic peptide
  N-term Acetic Acid
  MOD_RES (1)..(1): (R)-2-allylpyrrolidine-2-carboxylic acid
  MOD_RES (3)..(3): (S)-2-amino-3-cyclohexylpropanoic acid
  MOD_RES (4)..(4): 2-amino-2-(pent-4-en-1-yl)hept-6-enoic acid
  MOD_RES (7)..(7): N6-isopropyl-L-lysine
  MOD_RES (11)..(11): (S)-3-amino-1-((pent-4-en-1-yloxy)carbonyl)pyrrolidine-3- carboxylic acid
  MOD_RES (13)..(13): (S)-2-amino-3-(benzo[b]thiophen-3-yl)propanoic acid
  MOD_RES (14)..(14): L-homoserine
  C-term amino
XQXXDQKAFNXFXS

SEQ ID NO: 1616 - protein, 14 aa, Artificial Sequence
  Description of Artificial Sequence: Synthetic peptide
  N-term Acetic Acid
  MOD_RES (1)..(1): (R)-2-allylpyrrolidine-2-carboxylic acid
  MOD_RES (3)..(3): (S)-2-amino-3-cyclohexylpropanoic acid
  MOD_RES (4)..(4): 2-amino-2-(pent-4-en-1-yl)hept-6-enoic acid
  MOD_RES (7)..(7): N6-isopropyl-L-lysine
  MOD_RES (11)..(11): (S)-3-amino-1-((pent-4-en-1-yloxy)carbonyl)pyrrolidine-3- carboxylic acid
  MOD_RES (13)..(13): (S)-2-amino-3-(benzo[b]thiophen-3-yl)propanoic acid
  MOD_RES (14)..(14): L-homoserine
  C-term amino
XHXXDQKAFNXFXS

SEQ ID NO: 1617 - protein, 14 aa, Artificial Sequence
  Description of Artificial Sequence: Synthetic peptide
  N-term Acetic Acid
  MOD_RES (1)..(1): (R)-2-allylpyrrolidine-2-carboxylic acid
  MOD_RES (2)..(2): (S)-2-amino-3-(thiazol-4-yl)propanoic acid
  MOD_RES (3)..(3): (S)-2-amino-3-cyclohexylpropanoic acid
  MOD_RES (4)..(4): 2-amino-2-(pent-4-en-1-yl)hept-6-enoic acid
  MOD_RES (7)..(7): N6-isopropyl-L-lysine
  MOD_RES (11)..(11): (S)-3-amino-1-((pent-4-en-1-yloxy)carbonyl)pyrrolidine-3- carboxylic acid
  MOD_RES (13)..(13): (S)-2-amino-3-(benzo[b]thiophen-3-yl)propanoic acid
  MOD_RES (14)..(14): L-homoserine
  C-term amino
XXXXDQKAFNXFXS

SEQ ID NO: 1618 - protein, 14 aa, Artificial Sequence
  Description of Artificial Sequence: Synthetic peptide
  N-term Acetic Acid
  MOD_RES (1)..(1): (R)-2-allylpyrrolidine-2-carboxylic acid
  MOD_RES (2)..(2): (S)-2-amino-3-(1H-1,2,3-triazol-4-yl)propanoic acid
  MOD_RES (3)..(3): (S)-2-amino-3-cyclohexylpropanoic acid
  MOD_RES (4)..(4): 2-amino-2-(pent-4-en-1-yl)hept-6-enoic acid
  MOD_RES (7)..(7): N6-isopropyl-L-lysine
  MOD_RES (11)..(11): (S)-3-amino-1-((pent-4-en-1-yloxy)carbonyl)pyrrolidine-3- carboxylic acid
  MOD_RES (13)..(13): (S)-2-amino-3-(benzo[b]thiophen-3-yl)propanoic acid
  MOD_RES (14)..(14): L-homoserine
  C-term amino
XXXXDQKAFNXFXS

SEQ ID NO: 1619 - protein, 14 aa, Artificial Sequence
  Description of Artificial Sequence: Synthetic peptide
  N-term Acetic Acid
  MOD_RES (1)..(1): (R)-2-allylpyrrolidine-2-carboxylic acid
  MOD_RES (3)..(3): (S)-2-amino-3-cyclohexylpropanoic acid
  MOD_RES (4)..(4): 2-amino-2-(pent-4-en-1-yl)hept-6-enoic acid
  MOD_RES (7)..(7): N6-isopropyl-L-lysine
  MOD_RES (11)..(11): (S)-3-amino-1-((pent-4-en-1-yloxy)carbonyl)pyrrolidine-3- carboxylic acid
  MOD_RES (13)..(13): (S)-2-amino-3-(benzo[b]thiophen-3-yl)propanoic acid
  C-term amino
XNXXDQKAFNXFXH

SEQ ID NO: 1620 - protein, 14 aa, Artificial Sequence
  Description of Artificial Sequence: Synthetic peptide
  N-term Acetic Acid
  MOD_RES (1)..(1): (R)-2-allylpyrrolidine-2-carboxylic acid
  MOD_RES (3)..(3): (S)-2-amino-3-cyclohexylpropanoic acid
  MOD_RES (4)..(4): 2-amino-2-(pent-4-en-1-yl)hept-6-enoic acid
  MOD_RES (7)..(7): N6-isopropyl-L-lysine
  MOD_RES (11)..(11): (S)-3-amino-1-((pent-4-en-1-yloxy)carbonyl)pyrrolidine-3- carboxylic acid
  MOD_RES (13)..(13): (S)-2-amino-3-(benzo[b]thiophen-3-yl)propanoic acid
  C-term amino
XNXXDQKAFNXFXK

SEQ ID NO: 1621 - protein, 14 aa, Artificial Sequence
  Description of Artificial Sequence: Synthetic peptide
  N-term Acetic Acid
  MOD_RES (1)..(1): (R)-2-allylpyrrolidine-2-carboxylic acid
  MOD_RES (3)..(3): (S)-2-amino-3-cyclohexylpropanoic acid
  MOD_RES (4)..(4): 2-amino-2-(pent-4-en-1-yl)hept-6-enoic acid
  MOD_RES (7)..(7): N6-isopropyl-L-lysine
  MOD_RES (11)..(11): (S)-3-amino-1-((pent-4-en-1-yloxy)carbonyl)pyrrolidine-3- carboxylic acid
  MOD_RES (13)..(13): (S)-2-amino-3-(benzo[b]thiophen-3-yl)propanoic acid
  C-term amino
XNXXDQKAFNXFXN

SEQ ID NO: 1622 - protein, 14 aa, Artificial Sequence
  Description of Artificial Sequence: Synthetic peptide
  N-term Acetic Acid
  MOD_RES (1)..(1): (R)-2-allylpyrrolidine-2-carboxylic acid
  MOD_RES (3)..(3): (S)-2-amino-3-cyclohexylpropanoic acid
  MOD_RES (4)..(4): 2-amino-2-(pent-4-en-1-yl)hept-6-enoic acid
  MOD_RES (7)..(7): N6-isopropyl-L-lysine
  MOD_RES (11)..(11): (S)-3-amino-1-((pent-4-en-1-yloxy)carbonyl)pyrrolidine-3- carboxylic acid
  MOD_RES (13)..(13): (S)-2-amino-3-(benzo[b]thiophen-3-yl)propanoic acid
  C-term amino
XNXXDQKAFNXFXT

SEQ ID NO: 1623 - protein, 14 aa, Artificial Sequence
  Description of Artificial Sequence: Synthetic peptide
  N-term Acetic Acid
  MOD_RES (1)..(1): (R)-2-allylpyrrolidine-2-carboxylic acid
  MOD_RES (3)..(3): (S)-2-amino-3-cyclohexylpropanoic acid
  MOD_RES (4)..(4): 2-amino-2-(pent-4-en-1-yl)hept-6-enoic acid
  MOD_RES (7)..(7): N6-isopropyl-L-lysine
  MOD_RES (11)..(11): (S)-3-amino-1-((pent-4-en-1-yloxy)carbonyl)pyrrolidine-3- carboxylic acid
  MOD_RES (13)..(13): (S)-2-amino-3-(benzo[b]thiophen-3-yl)propanoic acid
  C-term amino
XNXXDQKAFNXFXQ

SEQ ID NO: 1624 - protein, 14 aa, Artificial Sequence
  Description of Artificial Sequence: Synthetic peptide
  N-term Acetic Acid
  MOD_RES (1)..(1): (R)-2-allylpyrrolidine-2-carboxylic acid
  MOD_RES (3)..(3): (S)-2-amino-4,4-dimethylpentanoic acid
  MOD_RES (4)..(4): 2-amino-2-(pent-4-en-1-yl)hept-6-enoic acid
  MOD_RES (6)..(6): (S)-2-amino-4-(4-hydroxyphenyl)butanoic acid
  MOD_RES (9)..(9): (S)-3-(2-amino-2-carboxyethyl)benzoic acid
  MOD_RES (11)..(11): (S)-3-amino-1-((pent-4-en-1-yloxy)carbonyl)pyrrolidine-3- carboxylic acid
  MOD_RES (12)..(12): (S)-2-amino-3-(thiophen-3-yl)propanoic acid
  MOD_RES (13)..(13): (S)-2-amino-3-(benzo[b]thiophen-3-yl)propanoic acid
  C-term amino
XDXXDXAAXNXXXQ

SEQ ID NO: 1625 - protein, 14 aa, Artificial Sequence
  Description of Artificial Sequence: Synthetic peptide
  N-term Acetic Acid
  MOD_RES (1)..(1): (R)-2-allylpyrrolidine-2-carboxylic acid
  MOD_RES (3)..(3): (S)-2-amino-4,4-dimethylpentanoic acid
  MOD_RES (4)..(4): 2-amino-2-(pent-4-en-1-yl)hept-6-enoic acid
  MOD_RES (6)..(6): (S)-2-amino-4-(4-hydroxyphenyl)butanoic acid
  MOD_RES (9)..(9): (S)-3-(2-amino-2-carboxyethyl)benzoic acid
  MOD_RES (10)..(10): L-homoserine
  MOD_RES (11)..(11): (S)-3-amino-1-((pent-4-en-1-yloxy)carbonyl)pyrrolidine-3- carboxylic acid
  MOD_RES (12)..(12): (S)-2-amino-3-(thiophen-3-yl)propanoic acid
  MOD_RES (13)..(13): (S)-2-amino-3-(benzo[b]thiophen-3-yl)propanoic acid
  C-term amino
XDXXDXAAXSXXXQ

SEQ ID NO: 1626 - protein, 14 aa, Artificial Sequence
  Description of Artificial Sequence: Synthetic peptide
  N-term Acetic Acid
  MOD_RES (1)..(1): (R)-2-allylpyrrolidine-2-carboxylic acid
  MOD_RES (3)..(3): (S)-2-amino-4,4-dimethylpentanoic acid
  MOD_RES (4)..(4): 2-amino-2-(pent-4-en-1-yl)hept-6-enoic acid
  MOD_RES (9)..(9): (S)-3-(2-amino-2-carboxyethyl)benzoic acid
  MOD_RES (11)..(11): (S)-3-amino-1-((pent-4-en-1-yloxy)carbonyl)pyrrolidine-3- carboxylic acid
  MOD_RES (12)..(12): (S)-2-amino-3-(thiophen-3-yl)propanoic acid
  MOD_RES (13)..(13): (S)-2-amino-3-(benzo[b]thiophen-3-yl)propanoic acid
  C-term amino
XDXXDHAAXNXXXQ

SEQ ID NO: 1627 - protein, 14 aa, Artificial Sequence
  Description of Artificial Sequence: Synthetic peptide
  N-term Acetic Acid
  MOD_RES (1)..(1): (R)-2-allylpyrrolidine-2-carboxylic acid
  MOD_RES (3)..(3): (S)-2-amino-4,4-dimethylpentanoic acid
  MOD_RES (4)..(4): 2-amino-2-(pent-4-en-1-yl)hept-6-enoic acid
  MOD_RES (9)..(9): (S)-3-(2-amino-2-carboxyethyl)benzoic acid
  MOD_RES (10)..(10): L-homoserine
  MOD_RES (11)..(11): (S)-3-amino-1-((pent-4-en-1-yloxy)carbonyl)pyrrolidine-3- carboxylic acid
  MOD_RES (12)..(12): (S)-2-amino-3-(thiophen-3-yl)propanoic acid
  MOD_RES (13)..(13): (S)-2-amino-3-(benzo[b]thiophen-3-yl)propanoic acid
  C-term amino
XDXXDHAAXSXXXQ

SEQ ID NO: 1628 - protein, 14 aa, Artificial Sequence
  Description of Artificial Sequence: Synthetic peptide
  N-term Acetic Acid
  MOD_RES (1)..(1): (R)-2-allylpyrrolidine-2-carboxylic acid
  MOD_RES (3)..(3): (S)-2-amino-4,4-dimethylpentanoic acid
  MOD_RES (4)..(4): 2-amino-2-(pent-4-en-1-yl)hept-6-enoic acid
  MOD_RES (9)..(9): (S)-3-(2-amino-2-carboxyethyl)benzoic acid
  MOD_RES (11)..(11): (S)-3-amino-1-((pent-4-en-1-yloxy)carbonyl)pyrrolidine-3- carboxylic acid
  MOD_RES (12)..(12): (S)-2-amino-3-(thiophen-3-yl)propanoic acid
  MOD_RES (13)..(13): (S)-2-amino-3-(benzo[b]thiophen-3-yl)propanoic acid
  C-term amino
XDXXDHAAXLXXXQ

SEQ ID NO: 1629 - protein, 14 aa, Artificial Sequence
  Description of Artificial Sequence: Synthetic peptide
  N-term Acetic Acid
  MOD_RES (1)..(1): (R)-2-allylpyrrolidine-2-carboxylic acid
  MOD_RES (3)..(3): (S)-2-amino-4,4-dimethylpentanoic acid
  MOD_RES (4)..(4): 2-amino-2-(pent-4-en-1-yl)hept-6-enoic acid
  MOD_RES (9)..(9): (S)-3-(2-amino-2-carboxyethyl)benzoic acid
  MOD_RES (10)..(10): L-homoserine
  MOD_RES (11)..(11): (S)-3-amino-1-((pent-4-en-1-yloxy)carbonyl)pyrrolidine-3- carboxylic acid
  MOD_RES (12)..(12): (S)-2-amino-3-(thiophen-3-yl)propanoic acid
  MOD_RES (13)..(13): (S)-2-amino-3-(benzo[b]thiophen-3-yl)propanoic acid
  C-term amino
XDXXDYAAXSXXXQ

SEQ ID NO: 1630 - protein, 14 aa, Artificial Sequence
  Description of Artificial Sequence: Synthetic peptide
  N-term Acetic Acid
  MOD_RES (1)..(1): (R)-2-allylpyrrolidine-2-carboxylic acid
  MOD_RES (3)..(3): (S)-2-amino-4,4-dimethylpentanoic acid
  MOD_RES (4)..(4): 2-amino-2-(pent-4-en-1-yl)hept-6-enoic acid
  MOD_RES (9)..(9): (S)-3-(2-amino-2-carboxyethyl)benzoic acid
  MOD_RES (11)..(11): (S)-3-amino-1-((pent-4-en-1-yloxy)carbonyl)pyrrolidine-3- carboxylic acid
  MOD_RES (12)..(12): (S)-2-amino-3-(thiophen-3-yl)propanoic acid
  MOD_RES (13)..(13): (S)-2-amino-3-(benzo[b]thiophen-3-yl)propanoic acid
  C-term amino
XDXXDYAAXLXXXQ

SEQ ID NO: 1631 - protein, 14 aa, Artificial Sequence
  Description of Artificial Sequence: Synthetic peptide
  N-term Acetic Acid
  MOD_RES (1)..(1): (R)-2-allylpyrrolidine-2-carboxylic acid
  MOD_RES (3)..(3): (S)-2-amino-4,4-dimethylpentanoic acid
  MOD_RES (4)..(4): 2-amino-2-(pent-4-en-1-yl)hept-6-enoic acid
  MOD_RES (9)..(9): (S)-3-(2-amino-2-carboxyethyl)benzoic acid
  MOD_RES (11)..(11): (S)-3-amino-1-((pent-4-en-1-yloxy)carbonyl)pyrrolidine-3- carboxylic acid
  MOD_RES (12)..(12): (S)-2-amino-3-(thiophen-3-yl)propanoic acid
  MOD_RES (13)..(13): (S)-2-amino-3-(benzo[b]thiophen-3-yl)propanoic acid
  C-term amino
XDXXDWAAXNXXXQ

SEQ ID NO: 1632 - protein, 14 aa, Artificial Sequence
  Description of Artificial Sequence: Synthetic peptide
  N-term Acetic Acid
  MOD_RES (1)..(1): (R)-2-allylpyrrolidine-2-carboxylic acid
  MOD_RES (3)..(3): (S)-2-amino-4,4-dimethylpentanoic acid
  MOD_RES (4)..(4): 2-amino-2-(pent-4-en-1-yl)hept-6-enoic acid
  MOD_RES (9)..(9): (S)-3-(2-amino-2-carboxyethyl)benzoic acid
  MOD_RES (10)..(10): L-homoserine
  MOD_RES (11)..(11): (S)-3-amino-1-((pent-4-en-1-yloxy)carbonyl)pyrrolidine-3- carboxylic acid
  MOD_RES (12)..(12): (S)-2-amino-3-(thiophen-3-yl)propanoic acid
  MOD_RES (13)..(13): (S)-2-amino-3-(benzo[b]thiophen-3-yl)propanoic acid
  C-term amino
XDXXDWAAXSXXXQ

SEQ ID NO: 1633 - protein, 14 aa, Artificial Sequence
  Description of Artificial Sequence: Synthetic peptide
  N-term Acetic Acid
  MOD_RES (1)..(1): (R)-2-allylpyrrolidine-2-carboxylic acid
  MOD_RES (3)..(3): (S)-2-amino-4,4-dimethylpentanoic acid
  MOD_RES (4)..(4): 2-amino-2-(pent-4-en-1-yl)hept-6-enoic acid
  MOD_RES (9)..(9): (S)-3-(2-amino-2-carboxyethyl)benzoic acid
  MOD_RES (11)..(11): (S)-3-amino-1-((pent-4-en-1-yloxy)carbonyl)pyrrolidine-3- carboxylic acid
  MOD_RES (12)..(12): (S)-2-amino-3-(thiophen-3-yl)propanoic acid
  MOD_RES (13)..(13): (S)-2-amino-3-(benzo[b]thiophen-3-yl)propanoic acid
  C-term amino
XDXXDWAAXLXXXQ

SEQ ID NO: 1634 - protein, 14 aa, Artificial Sequence
  Description of Artificial Sequence: Synthetic peptide
  N-term Acetic Acid
  MOD_RES (1)..(1): (R)-2-allylpyrrolidine-2-carboxylic acid
  MOD_RES (2)..(2): (S)-2-amino-3-((carboxymethyl)(2,2,2-trifluoroethyl)amino) propanoic acid
  MOD_RES (3)..(3): (S)-2-amino-4,4-dimethylpentanoic acid
  MOD_RES (4)..(4): 2-amino-2-(pent-4-en-1-yl)hept-6-enoic acid
  MOD_RES (11)..(11): (S)-3-amino-1-((pent-4-en-1-yloxy)carbonyl)pyrrolidine-3- carboxylic acid
  MOD_RES (12)..(12): (S)-2-amino-3-(thiophen-3-yl)propanoic acid
  MOD_RES (13)..(13): (S)-2-amino-3-(benzo[b]thiophen-3-yl)propanoic acid
  C-term amino
XXXXNTAAFNXXXQ

SEQ ID NO: 1635 - protein, 14 aa, Artificial Sequence
  Description of Artificial Sequence: Synthetic peptide
  N-term Acetic Acid
  MOD_RES (1)..(1): (R)-2-allylpyrrolidine-2-carboxylic acid
  MOD_RES (2)..(2): (S)-2-aminohexanedioic acid
  MOD_RES (3)..(3): (S)-2-amino-4,4-dimethylpentanoic acid
  MOD_RES (4)..(4): 2-amino-2-(pent-4-en-1-yl)hept-6-enoic acid
  MOD_RES (11)..(11): (S)-3-amino-1-((pent-4-en-1-yloxy)carbonyl)pyrrolidine-3- carboxylic acid
  MOD_RES (12)..(12): (S)-2-amino-3-(thiophen-3-yl)propanoic acid
  MOD_RES (13)..(13): (S)-2-amino-3-(benzo[b]thiophen-3-yl)propanoic acid
  C-term amino
XXXXNTAAFNXXXQ

SEQ ID NO: 1636 - protein, 14 aa, Artificial Sequence
  Description of Artificial Sequence: Synthetic peptide
  N-term Acetic Acid
  MOD_RES (1)..(1): (R)-2-allylpyrrolidine-2-carboxylic acid
  MOD_RES (2)..(2): (S)-3-(2-amino-2-carboxyethyl)benzoic acid
  MOD_RES (3)..(3): (S)-2-amino-4,4-dimethylpentanoic acid
  MOD_RES (4)..(4): 2-amino-2-(pent-4-en-1-yl)hept-6-enoic acid
  MOD_RES (11)..(11): (S)-3-amino-1-((pent-4-en-1-yloxy)carbonyl)pyrrolidine-3- carboxylic acid
  MOD_RES (12)..(12): (S)-2-amino-3-(thiophen-3-yl)propanoic acid
  MOD_RES (13)..(13): (S)-2-amino-3-(benzo[b]thiophen-3-yl)propanoic acid
  C-term amino
XXXXNTAAFNXXXQ

SEQ ID NO: 1637 - protein, 14 aa, Artificial Sequence
  Description of Artificial Sequence: Synthetic peptide
  N-term Acetic Acid
  MOD_RES (1)..(1): (R)-2-allylpyrrolidine-2-carboxylic acid
  MOD_RES (2)..(2): (S)-2-(2-amino-2-carboxyethyl)benzoic acid
  MOD_RES (3)..(3): (S)-2-amino-4,4-dimethylpentanoic acid
  MOD_RES (4)..(4): 2-amino-2-(pent-4-en-1-yl)hept-6-enoic acid
  MOD_RES (11)..(11): (S)-3-amino-1-((pent-4-en-1-yloxy)carbonyl)pyrrolidine-3- carboxylic acid
  MOD_RES (12)..(12): (S)-2-amino-3-(thiophen-3-yl)propanoic acid
  MOD_RES (13)..(13): (S)-2-amino-3-(benzo[b]thiophen-3-yl)propanoic acid
  C-term amino
XXXXNTAAFNXXXQ

SEQ ID NO: 1638 - protein, 14 aa, Artificial Sequence
  Description of Artificial Sequence: Synthetic peptide
  N-term Acetic Acid
  MOD_RES (1)..(1): (R)-2-allylpyrrolidine-2-carboxylic acid
  MOD_RES (3)..(3): (S)-2-amino-4,4-dimethylpentanoic acid
  MOD_RES (4)..(4): 2-amino-2-(pent-4-en-1-yl)hept-6-enoic acid
  MOD_RES (11)..(11): (S)-3-amino-1-((pent-4-en-1-yloxy)carbonyl)pyrrolidine-3- carboxylic acid
  MOD_RES (12)..(12): (S)-2-amino-3-(thiophen-3-yl)propanoic acid
  MOD_RES (13)..(13): (S)-2-amino-3-(benzo[b]thiophen-3-yl)propanoic acid
  C-term amino
XDXXNTAAFNXXXW

SEQ ID NO: 1639 - protein, 14 aa, Artificial Sequence
  Description of Artificial Sequence: Synthetic peptide
  N-term Acetic Acid
  MOD_RES (1)..(1): (R)-2-allylpyrrolidine-2-carboxylic acid
  MOD_RES (3)..(3): (S)-2-amino-4,4-dimethylpentanoic acid
  MOD_RES (4)..(4): 2-amino-2-(pent-4-en-1-yl)hept-6-enoic acid
  MOD_RES (11)..(11): (S)-3-amino-1-((pent-4-en-1-yloxy)carbonyl)pyrrolidine-3- carboxylic acid
  MOD_RES (12)..(12): (S)-2-amino-3-(thiophen-3-yl)propanoic acid
  MOD_RES (13)..(13): (S)-2-amino-3-(benzo[b]thiophen-3-yl)propanoic acid
  C-term amino
XDXXNTAAFNXXXH

SEQ ID NO: 1640 - protein, 14 aa, Artificial Sequence
  Description of Artificial Sequence: Synthetic peptide
  N-term Acetic Acid
  MOD_RES (1)..(1): (R)-2-allylpyrrolidine-2-carboxylic acid
  MOD_RES (3)..(3): (S)-2-amino-4,4-dimethylpentanoic acid
  MOD_RES (4)..(4): 2-amino-2-(pent-4-en-1-yl)hept-6-enoic acid
  MOD_RES (11)..(11): (S)-3-amino-1-((pent-4-en-1-yloxy)carbonyl)pyrrolidine-3- carboxylic acid
  MOD_RES (12)..(12): (S)-2-amino-3-(thiophen-3-yl)propanoic acid
  MOD_RES (13)..(13): (S)-2-amino-3-(benzo[b]thiophen-3-yl)propanoic acid
  C-term amino
XDXXNTAAFNXXXA

SEQ ID NO: 1641 - protein, 14 aa, Artificial Sequence
  Description of Artificial Sequence: Synthetic peptide
  N-term Acetic Acid
  MOD_RES (1)..(1): (R)-2-allylpyrrolidine-2-carboxylic acid
  MOD_RES (3)..(3): (S)-2-amino-4,4-dimethylpentanoic acid
  MOD_RES (4)..(4): 2-amino-2-(pent-4-en-1-yl)hept-6-enoic acid
  MOD_RES (11)..(11): (S)-3-amino-1-((pent-4-en-1-yloxy)carbonyl)pyrrolidine-3- carboxylic acid
  MOD_RES (12)..(12): (S)-2-amino-3-(thiophen-3-yl)propanoic acid
  MOD_RES (13)..(13): (S)-2-amino-3-(benzo[b]thiophen-3-yl)propanoic acid
  C-term amino
XDXXNTAAFTXXXF

SEQ ID NO: 1642 - protein, 14 aa, Artificial Sequence
  Description of Artificial Sequence: Synthetic peptide
  N-term Acetic Acid
  MOD_RES (1)..(1): (R)-2-allylpyrrolidine-2-carboxylic acid
  MOD_RES (3)..(3): (S)-2-amino-4,4-dimethylpentanoic acid
  MOD_RES (4)..(4): 2-amino-2-(pent-4-en-1-yl)hept-6-enoic acid
  MOD_RES (11)..(11): (S)-3-amino-1-((pent-4-en-1-yloxy)carbonyl)pyrrolidine-3- carboxylic acid
  MOD_RES (12)..(12): (S)-2-amino-3-(thiophen-3-yl)propanoic acid
  MOD_RES (13)..(13): (S)-2-amino-3-(benzo[b]thiophen-3-yl)propanoic acid
  C-term amino
XDXXNTAAFHXXXQ

SEQ ID NO: 1643 - protein, 14 aa, Artificial Sequence
  Description of Artificial Sequence: Synthetic peptide
  N-term Acetic Acid
  MOD_RES (1)..(1): (R)-2-allylpyrrolidine-2-carboxylic acid
  MOD_RES (3)..(3): (S)-2-amino-4,4-dimethylpentanoic acid
  MOD_RES (4)..(4): 2-amino-2-(pent-4-en-1-yl)hept-6-enoic acid
  MOD_RES (11)..(11): (S)-3-amino-1-((pent-4-en-1-yloxy)carbonyl)pyrrolidine-3- carboxylic acid
  MOD_RES (12)..(12): (S)-2-amino-3-(thiophen-3-yl)propanoic acid
  MOD_RES (13)..(13): (S)-2-amino-3-(benzo[b]thiophen-3-yl)propanoic acid
  C-term amino
XDXXTTAAFNXXXQ

SEQ ID NO: 1644 - protein, 14 aa, Artificial Sequence
  Description of Artificial Sequence: Synthetic peptide
  N-term Acetic Acid
  MOD_RES (1)..(1): (R)-2-allylpyrrolidine-2-carboxylic acid
  MOD_RES (3)..(3): (S)-2-amino-4,4-dimethylpentanoic acid
  MOD_RES (4)..(4): 2-amino-2-(pent-4-en-1-yl)hept-6-enoic acid
  MOD_RES (6)..(6): (S)-2-amino-3-((carboxymethyl)(2,2,2-trifluoroethyl)amino) propanoic acid
  MOD_RES (9)..(9): (R)-2-amino-3-(3-(phenoxycarbonyl)phenyl)propanoic acid
  MOD_RES (11)..(11): (S)-3-amino-1-((pent-4-en-1-yloxy)carbonyl)pyrrolidine-3- carboxylic acid
  MOD_RES (12)..(12): (S)-2-amino-3-(thiophen-3-yl)propanoic acid
  MOD_RES (13)..(13): (S)-2-amino-3-(benzo[b]thiophen-3-yl)propanoic acid
  C-term amino
XDXXDXAAFLXXXQ

SEQ ID NO: 1645 - protein, 14 aa, Artificial Sequence
  Description of Artificial Sequence: Synthetic peptide
  N-term Acetic Acid
  MOD_RES (1)..(1): (R)-2-allylpyrrolidine-2-carboxylic acid
  MOD_RES (3)..(3): (S)-2-amino-4,4-dimethylpentanoic acid
  MOD_RES (4)..(4): 2-amino-2-(pent-4-en-1-yl)hept-6-enoic acid
  MOD_RES (6)..(6): (S)-3-(2-amino-2-carboxyethyl)benzoic acid
  MOD_RES (11)..(11): (S)-3-amino-1-((pent-4-en-1-yloxy)carbonyl)pyrrolidine-3- carboxylic acid
  MOD_RES (12)..(12): (S)-2-amino-3-(3-bromophenyl)propanoic acid
  MOD_RES (13)..(13): (S)-2-amino-3-(thiophen-3-yl)propanoic acid
  C-term amino
XDXXDXAAFLXFXQ

SEQ ID NO: 1646 - protein, 14 aa, Artificial Sequence
  Description of Artificial Sequence: Synthetic peptide
  N-term Acetic Acid
  MOD_RES (1)..(1): (R)-2-allylpyrrolidine-2-carboxylic acid
  MOD_RES (3)..(3): (S)-2-amino-4,4-dimethylpentanoic acid
  MOD_RES (4)..(4): 2-amino-2-(pent-4-en-1-yl)hept-6-enoic acid
  MOD_RES (6)..(6): (S)-3-(2-amino-2-carboxyethyl)benzoic acid
  MOD_RES (11)..(11): (S)-3-amino-1-((pent-4-en-1-yloxy)carbonyl)pyrrolidine-3- carboxylic acid
  MOD_RES (12)..(12): (S)-2-amino-3-(3-bromophenyl)propanoic acid
  C-term amino
XDXXDXAAFLXFFQ

SEQ ID NO: 1647 - protein, 14 aa, Artificial Sequence
  Description of Artificial Sequence: Synthetic peptide
  N-term Acetic Acid
  MOD_RES (1)..(1): (R)-2-allylpyrrolidine-2-carboxylic acid
  MOD_RES (3)..(3): (S)-2-amino-4,4-dimethylpentanoic acid
  MOD_RES (4)..(4): 2-amino-2-(pent-4-en-1-yl)hept-6-enoic acid
  MOD_RES (6)..(6): (S)-3-(2-amino-2-carboxyethyl)benzoic acid
  MOD_RES (11)..(11): (S)-3-amino-1-((pent-4-en-1-yloxy)carbonyl)pyrrolidine-3- carboxylic acid
  MOD_RES (12)..(12): (S)-2-amino-3-(3-bromophenyl)propanoic acid
  MOD_RES (13)..(13): (S)-2-amino-3-cyclobutylpropanoic acid
  C-term amino
XDXXDXAAFLXFXQ

SEQ ID NO: 1648 - protein, 14 aa, Artificial Sequence
  Description of Artificial Sequence: Synthetic peptide
  N-term Acetic Acid
  MOD_RES (1)..(1): (R)-2-allylpyrrolidine-2-carboxylic acid
  MOD_RES (3)..(3): (S)-2-amino-4,4-dimethylpentanoic acid
  MOD_RES (4)..(4): 2-amino-2-(pent-4-en-1-yl)hept-6-enoic acid
  MOD_RES (6)..(6): (S)-3-(2-amino-2-carboxyethyl)benzoic acid
  MOD_RES (11)..(11): (S)-3-amino-1-((pent-4-en-1-yloxy)carbonyl)pyrrolidine-3- carboxylic acid
  MOD_RES (12)..(12): (S)-2-amino-3-(3-bromophenyl)propanoic acid
  MOD_RES (13)..(13): (S)-2-amino-3-(2-(trifluoromethyl)phenyl)propanoic acid
  C-term amino
XDXXDXAAFLXFFQ

SEQ ID NO: 1649 - protein, 14 aa, Artificial Sequence
  Description of Artificial Sequence: Synthetic peptide
  N-term Acetic Acid
  MOD_RES (1)..(1): (R)-2-allylpyrrolidine-2-carboxylic acid
  MOD_RES (3)..(3): (S)-2-amino-4,4-dimethylpentanoic acid
  MOD_RES (4)..(4): 2-allyl-2-aminopent-4-enoic acid
  MOD_RES (11)..(11): (S)-3-amino-1-((pent-4-en-1-yloxy)carbonyl)pyrrolidine-3- carboxylic acid
  MOD_RES (12)..(12): (S)-2-amino-3-(thiophen-3-yl)propanoic acid
  MOD_RES (13)..(13): (S)-2-amino-3-(benzo[b]thiophen-3-yl)propanoic acid
  C-term amino
XDXXDDAAFLXXXQ

SEQ ID NO: 1650 - protein, 14 aa, Artificial Sequence
  Description of Artificial Sequence: Synthetic peptide
  N-term Acetic Acid
  MOD_RES (1)..(1): (R)-2-allylpyrrolidine-2-carboxylic acid
  MOD_RES (3)..(3): (S)-2-amino-4,4-dimethylpentanoic acid
  MOD_RES (4)..(4): 2-allyl-2-aminopent-4-enoic acid
  MOD_RES (11)..(11): (S)-3-amino-1-((hex-5-en-1-yloxy)carbonyl)pyrrolidine-3- carboxylic acid
  MOD_RES (12)..(12): (S)-2-amino-3-(thiophen-3-yl)propanoic acid
  MOD_RES (13)..(13): (S)-2-amino-3-(benzo[b]thiophen-3-yl)propanoic acid
  C-term amino
XDXXDDAAFLXXXQ

SEQ ID NO: 1651 - protein, 14 aa, Artificial Sequence
  Description of Artificial Sequence: Synthetic peptide
  N-term Acetic Acid
  MOD_RES (1)..(1): (R)-2-allylpyrrolidine-2-carboxylic acid
  MOD_RES (3)..(3): (S)-2-amino-4,4-dimethylpentanoic acid
  MOD_RES (4)..(4): 2-allyl-2-aminopent-4-enoic acid
  MOD_RES (11)..(11): (S)-3-amino-1-((hept-6-en-1-yloxy)carbonyl)pyrrolidine-3- carboxylic acid
  MOD_RES (12)..(12): (S)-2-amino-3-(thiophen-3-yl)propanoic acid
  MOD_RES (13)..(13): (S)-2-amino-3-(benzo[b]thiophen-3-yl)propanoic acid
  C-term amino
XDXXDDAAFLXXXQ

SEQ ID NO: 1652 - protein, 14 aa, Artificial Sequence
  Description of Artificial Sequence: Synthetic peptide
  N-term Acetic Acid
  MOD_RES (1)..(1): (R)-2-allylpyrrolidine-2-carboxylic acid
  MOD_RES (3)..(3): (S)-2-amino-3-cyclohexylpropanoic acid
  MOD_RES (4)..(4): 2-amino-2-(pent-4-en-1-yl)hept-6-enoic acid
  MOD_RES (7)..(7): N6-isopropyl-L-lysine
  MOD_RES (11)..(11): (S)-3-amino-1-((pent-4-en-1-yloxy)carbonyl)pyrrolidine-3- carboxylic acid
  MOD_RES (12)..(12): (S)-2-amino-3-(3-carbamoylphenyl)propanoic acid
  MOD_RES (13)..(13): (S)-2-amino-3-(benzo[b]thiophen-3-yl)propanoic acid
  C-term amino
XNXXDQKAFLXFXQ

SEQ ID NO: 1653 - protein, 14 aa, Artificial Sequence
  Description of Artificial Sequence: Synthetic peptide
  N-term Acetic Acid
  MOD_RES (1)..(1): (R)-2-allylpyrrolidine-2-carboxylic acid
  MOD_RES (3)..(3): (S)-2-amino-3-cyclohexylpropanoic acid
  MOD_RES (4)..(4): 2-amino-2-(pent-4-en-1-yl)hept-6-enoic acid
  MOD_RES (7)..(7): N6-isopropyl-L-lysine
  MOD_RES (11)..(11): (S)-3-amino-1-((pent-4-en-1-yloxy)carbonyl)pyrrolidine-3- carboxylic acid
  MOD_RES (12)..(12): (S)-2-amino-3-(3-carbamoylphenyl)propanoic acid
  MOD_RES (13)..(13): (S)-2-amino-3-(benzo[b]thiophen-3-yl)propanoic acid
  C-term amino
XNXXDQKAFNXFXQ

SEQ ID NO: 1654 - protein, 14 aa, Artificial Sequence
  Description of Artificial Sequence: Synthetic peptide
  N-term Acetic Acid
  MOD_RES (1)..(1): (R)-2-allylpyrrolidine-2-carboxylic acid
  MOD_RES (3)..(3): (S)-2-amino-3-cyclohexylpropanoic acid
  MOD_RES (4)..(4): 2-amino-2-(pent-4-en-1-yl)hept-6-enoic acid
  MOD_RES (7)..(7): N6-isopropyl-L-lysine
  MOD_RES (11)..(11): (S)-3-amino-1-((pent-4-en-1-yloxy)carbonyl)pyrrolidine-3- carboxylic acid
  MOD_RES (13)..(13): (S)-2-amino-3-(benzo[b]thiophen-3-yl)propanoic acid
  MOD_RES (14)..(14): L-homoserine
  C-term amino
XNXXDQKAFLXFXS

SEQ ID NO: 1655 - protein, 14 aa, Artificial Sequence
  Description of Artificial Sequence: Synthetic peptide
  N-term Acetic Acid
  MOD_RES (1)..(1): (R)-2-allylpyrrolidine-2-carboxylic acid
  MOD_RES (3)..(3): (S)-2-amino-3-cyclohexylpropanoic acid
  MOD_RES (4)..(4): 2-amino-2-(pent-4-en-1-yl)hept-6-enoic acid
  MOD_RES (7)..(7): N6-isopropyl-L-lysine
  MOD_RES (11)..(11): (S)-3-amino-1-((pent-4-en-1-yloxy)carbonyl)pyrrolidine-3- carboxylic acid
  MOD_RES (12)..(12): (S)-2-amino-3-(3-carbamoylphenyl)propanoic acid
  MOD_RES (13)..(13): (S)-2-amino-3-(benzo[b]thiophen-3-yl)propanoic acid
  MOD_RES (14)..(14): L-homoserine
  C-term amino
XNXXDQKAFLXFXS

SEQ ID NO: 1656 - protein, 14 aa, Artificial Sequence
  Description of Artificial Sequence: Synthetic peptide
  N-term Acetic Acid
  MOD_RES (1)..(1): (R)-2-allylpyrrolidine-2-carboxylic acid
  MOD_RES (3)..(3): (S)-2-amino-3-cyclohexylpropanoic acid
  MOD_RES (4)..(4): 2-amino-2-(pent-4-en-1-yl)hept-6-enoic acid
  MOD_RES (7)..(7): N6-isopropyl-L-lysine
  MOD_RES (11)..(11): (S)-3-amino-1-((pent-4-en-1-yloxy)carbonyl)pyrrolidine-3- carboxylic acid
  MOD_RES (13)..(13): (S)-2-amino-3-(benzo[b]thiophen-3-yl)propanoic acid
  MOD_RES (14)..(14): L-homoserine
  C-term amino
XNXXDQKAFNXFXS

SEQ ID NO: 1657 - protein, 14 aa, Artificial Sequence
  Description of Artificial Sequence: Synthetic peptide
  N-term Acetic Acid
  MOD_RES (1)..(1): (R)-2-allylpyrrolidine-2-carboxylic acid
  MOD_RES (3)..(3): (S)-2-amino-3-cyclohexylpropanoic acid
  MOD_RES (4)..(4): 2-amino-2-(pent-4-en-1-yl)hept-6-enoic acid
  MOD_RES (7)..(7): N6-isopropyl-L-lysine
  MOD_RES (11)..(11): (S)-3-amino-1-((pent-4-en-1-yloxy)carbonyl)pyrrolidine-3- carboxylic acid
  MOD_RES (12)..(12): (S)-2-amino-3-(2-carbamoylphenyl)propanoic acid
  MOD_RES (13)..(13): (S)-2-amino-3-(benzo[b]thiophen-3-yl)propanoic acid
  MOD_RES (14)..(14): L-homoserine
  C-term amino
XNXXDQKAFNXFXS

SEQ ID NO: 1658 - protein, 14 aa, Artificial Sequence
  Description of Artificial Sequence: Synthetic peptide
  N-term Acetic Acid
  MOD_RES (1)..(1): (R)-2-allylpyrrolidine-2-carboxylic acid
  MOD_RES (3)..(3): (S)-2-amino-3-cyclohexylpropanoic acid
  MOD_RES (4)..(4): 2-amino-2-(pent-4-en-1-yl)hept-6-enoic acid
  MOD_RES (7)..(7): N6-isopropyl-L-lysine
  MOD_RES (11)..(11): (S)-3-amino-1-((pent-4-en-1-yloxy)carbonyl)pyrrolidine-3- carboxylic acid
  MOD_RES (12)..(12): (S)-2-amino-3-(4-carbamoylphenyl)propanoic acid
  MOD_RES (13)..(13): (S)-2-amino-3-(benzo[b]thiophen-3-yl)propanoic acid
  MOD_RES (14)..(14): L-homoserine
  C-term amino
XNXXDQKAFNXFXS

SEQ ID NO: 1659 - protein, 14 aa, Artificial Sequence
  Description of Artificial Sequence: Synthetic peptide
  N-term Acetic Acid
  MOD_RES (1)..(1): (R)-2-allylpyrrolidine-2-carboxylic acid
  MOD_RES (3)..(3): (S)-2-amino-3-cyclohexylpropanoic acid
  MOD_RES (4)..(4): 2-amino-2-(pent-4-en-1-yl)hept-6-enoic acid
  MOD_RES (7)..(7): N6-isopropyl-L-lysine
  MOD_RES (11)..(11): (S)-3-amino-1-((pent-4-en-1-yloxy)carbonyl)pyrrolidine-3- carboxylic acid
  MOD_RES (13)..(13): (S)-2-amino-3-(benzo[b]thiophen-3-yl)propanoic acid
  MOD_RES (14)..(14): L-homoserine
  C-term amino
XNXXDQKAFNXNXS

SEQ ID NO: 1660 - protein, 14 aa, Artificial Sequence
  Description of Artificial Sequence: Synthetic peptide
  N-term Acetic Acid
  MOD_RES (1)..(1): (R)-2-allylpyrrolidine-2-carboxylic acid
  MOD_RES (3)..(3): (S)-2-amino-3-cyclohexylpropanoic acid
  MOD_RES (4)..(4): 2-amino-2-(pent-4-en-1-yl)hept-6-enoic acid
  MOD_RES (7)..(7): N6-isopropyl-L-lysine
  MOD_RES (11)..(11): (S)-3-amino-1-((pent-4-en-1-yloxy)carbonyl)pyrrolidine-3- carboxylic acid
  MOD_RES (13)..(13): (S)-2-amino-3-(benzo[b]thiophen-3-yl)propanoic acid
  MOD_RES (14)..(14): L-homoserine
  C-term amino
XNXXDQKAFNXQXS

SEQ ID NO: 1661 - protein, 14 aa, Artificial Sequence
  Description of Artificial Sequence: Synthetic peptide
  N-term Acetic Acid
  MOD_RES (1)..(1): (R)-2-allylpyrrolidine-2-carboxylic acid
  MOD_RES (3)..(3): (S)-2-amino-3-cyclohexylpropanoic acid
  MOD_RES (4)..(4): 2-amino-2-(pent-4-en-1-yl)hept-6-enoic acid
  MOD_RES (7)..(7): N6-isopropyl-L-lysine
  MOD_RES (11)..(11): (S)-3-amino-1-((pent-4-en-1-yloxy)carbonyl)pyrrolidine-3- carboxylic acid
  MOD_RES (13)..(13): (S)-2-amino-3-(benzo[b]thiophen-3-yl)propanoic acid
  MOD_RES (14)..(14): L-homoserine
  C-term amino
XNXXDQKAFNXYXS

SEQ ID NO: 1662 - protein, 14 aa, Artificial Sequence
  Description of Artificial Sequence: Synthetic peptide
  N-term Acetic Acid
  MOD_RES (1)..(1): (R)-2-allylpyrrolidine-2-carboxylic acid
  MOD_RES (3)..(3): (S)-2-amino-3-cyclohexylpropanoic acid
  MOD_RES (4)..(4): 2-amino-2-(pent-4-en-1-yl)hept-6-enoic acid
  MOD_RES (7)..(7): N6-isopropyl-L-lysine
  MOD_RES (9)..(9): (S)-2-amino-3-(2-carbamoylphenyl)propanoic acid
  MOD_RES (11)..(11): (S)-3-amino-1-((pent-4-en-1-yloxy)carbonyl)pyrrolidine-3- carboxylic acid
  MOD_RES (13)..(13): (S)-2-amino-3-(benzo[b]thiophen-3-yl)propanoic acid
  MOD_RES (14)..(14): L-homoserine
  C-term amino
XNXXDQKAFNXFXS

SEQ ID NO: 1663 - protein, 14 aa, Artificial Sequence
  Description of Artificial Sequence: Synthetic peptide
  N-term Acetic Acid
  MOD_RES (1)..(1): (R)-2-allylpyrrolidine-2-carboxylic acid
  MOD_RES (3)..(3): (S)-2-amino-3-cyclohexylpropanoic acid
  MOD_RES (4)..(4): 2-amino-2-(pent-4-en-1-yl)hept-6-enoic acid
  MOD_RES (7)..(7): N6-isopropyl-L-lysine
  MOD_RES (9)..(9): (S)-2-amino-3-(4-carbamoylphenyl)propanoic acid
  MOD_RES (11)..(11): (S)-3-amino-1-((pent-4-en-1-yloxy)carbonyl)pyrrolidine-3- carboxylic acid
  MOD_RES (13)..(13): (S)-2-amino-3-(benzo[b]thiophen-3-yl)propanoic acid
  MOD_RES (14)..(14): L-homoserine
  C-term amino
XNXXDQKAFNXFXS

SEQ ID NO: 1664 - protein, 14 aa, Artificial Sequence
  Description of Artificial Sequence: Synthetic peptide
  N-term Acetic Acid
  MOD_RES (1)..(1): (R)-2-allylpyrrolidine-2-carboxylic acid
  MOD_RES (3)..(3): (S)-2-amino-4,4-dimethylpentanoic acid
  MOD_RES (4)..(4): 2-amino-2-(pent-4-en-1-yl)hept-6-enoic acid
  MOD_RES (11)..(11): (S)-3-amino-1-((pent-4-en-1-yloxy)carbonyl)pyrrolidine-3- carboxylic acid
  MOD_RES (12)..(12): (S)-2-amino-3-(thiophen-3-yl)propanoic acid
  C-term amino
XDXXDDAAFNXXWQ

SEQ ID NO: 1665 - protein, 14 aa, Artificial Sequence
  Description of Artificial Sequence: Synthetic peptide
  N-term Acetic Acid
  MOD_RES (1)..(1): (R)-2-allylpyrrolidine-2-carboxylic acid
  MOD_RES (3)..(3): (S)-2-amino-4,4-dimethylpentanoic acid
  MOD_RES (4)..(4): 2-amino-2-(pent-4-en-1-yl)hept-6-enoic acid
  MOD_RES (11)..(11): (S)-3-amino-1-((pent-4-en-1-yloxy)carbonyl)pyrrolidine-3- carboxylic acid
  MOD_RES (12)..(12): (S)-2-amino-3-(thiophen-3-yl)propanoic acid
  MOD_RES (13)..(13): (S)-2-amino-3-(4-chloro-1H-indol-3-yl)propanoic acid
  C-term amino
XDXXDDAAFNXXXQ

SEQ ID NO: 1666 - protein, 14 aa, Artificial Sequence
  Description of Artificial Sequence: Synthetic peptide
  N-term Acetic Acid
  MOD_RES (1)..(1): (R)-2-allylpyrrolidine-2-carboxylic acid
  MOD_RES (3)..(3): (S)-2-amino-4,4-dimethylpentanoic acid
  MOD_RES (4)..(4): 2-amino-2-(pent-4-en-1-yl)hept-6-enoic acid
  MOD_RES (11)..(11): (S)-3-amino-1-((pent-4-en-1-yloxy)carbonyl)pyrrolidine-3- carboxylic acid
  MOD_RES (12)..(12): (S)-2-amino-3-(thiophen-3-yl)propanoic acid
  MOD_RES (13)..(13): (S)-2-amino-3-(4-chloro-1H-indol-3-yl)propanoic acid
  C-term amino
XDXXDDAAFLXXXQ

SEQ ID NO: 1667 - protein, 14 aa, Artificial Sequence
  Description of Artificial Sequence: Synthetic peptide
  N-term Acetic Acid
  MOD_RES (1)..(1): (R)-2-allylpyrrolidine-2-carboxylic acid
  MOD_RES (3)..(3): (S)-2-amino-4,4-dimethylpentanoic acid
  MOD_RES (4)..(4): 2-amino-2-(pent-4-en-1-yl)hept-6-enoic acid
  MOD_RES (11)..(11): (S)-3-amino-1-((pent-4-en-1-yloxy)carbonyl)pyrrolidine-3- carboxylic acid
  MOD_RES (12)..(12): (S)-2-amino-3-(thiophen-3-yl)propanoic acid
  MOD_RES (13)..(13): (S)-2-amino-3-(4-fluoro-1H-indol-3-yl)propanoic acid
  C-term amino
XDXXDDAAFNXXXQ

SEQ ID NO: 1668 - protein, 14 aa, Artificial Sequence
  Description of Artificial Sequence: Synthetic peptide
  N-term Acetic Acid
  MOD_RES (1)..(1): (R)-2-allylpyrrolidine-2-carboxylic acid
  MOD_RES (3)..(3): (S)-2-amino-4,4-dimethylpentanoic acid
  MOD_RES (4)..(4): 2-amino-2-(pent-4-en-1-yl)hept-6-enoic acid
  MOD_RES (11)..(11): (S)-3-amino-1-((pent-4-en-1-yloxy)carbonyl)pyrrolidine-3- carboxylic acid
  MOD_RES (12)..(12): (S)-2-amino-3-(thiophen-3-yl)propanoic acid
  MOD_RES (13)..(13): (S)-2-amino-3-(4-fluoro-1H-indol-3-yl)propanoic acid
  C-term amino
XDXXDDAAFLXXXQ

SEQ ID NO: 1669 - protein, 14 aa, Artificial Sequence
  Description of Artificial Sequence: Synthetic peptide
  N-term Acetic Acid
  MOD_RES (1)..(1): (R)-2-allylpyrrolidine-2-carboxylic acid
  MOD_RES (3)..(3): (S)-2-amino-4,4-dimethylpentanoic acid
  MOD_RES (4)..(4): 2-amino-2-(pent-4-en-1-yl)hept-6-enoic acid
  MOD_RES (11)..(11): (S)-3-amino-1-((pent-4-en-1-yloxy)carbonyl)pyrrolidine-3- carboxylic acid
  MOD_RES (12)..(12): (S)-2-amino-3-(thiophen-3-yl)propanoic acid
  MOD_RES (13)..(13): (S)-2-amino-3-(1H-pyrrolo[2,3-b]pyridin-3-yl)propanoic acid
  C-term amino
XDXXDDAAFNXXXQ

SEQ ID NO: 1670 - protein, 14 aa, Artificial Sequence
  Description of Artificial Sequence: Synthetic peptide
  N-term Acetic Acid
  MOD_RES (1)..(1): (R)-2-allylpyrrolidine-2-carboxylic acid
  MOD_RES (3)..(3): (S)-2-amino-4,4-dimethylpentanoic acid
  MOD_RES (4)..(4): 2-amino-2-(pent-4-en-1-yl)hept-6-enoic acid
  MOD_RES (11)..(11): (S)-3-amino-1-((pent-4-en-1-yloxy)carbonyl)pyrrolidine-3- carboxylic acid
  MOD_RES (12)..(12): (S)-2-amino-3-(thiophen-3-yl)propanoic acid
  MOD_RES (13)..(13): (S)-2-amino-3-(1H-pyrrolo[2,3-b]pyridin-3-yl)propanoic acid
  C-term amino
XDXXDDAAFLXXXQ

SEQ ID NO: 1671 - protein, 14 aa, Artificial Sequence
  Description of Artificial Sequence: Synthetic peptide
  N-term Acetic Acid
  MOD_RES (1)..(1): (R)-2-allylpyrrolidine-2-carboxylic acid
  MOD_RES (3)..(3): (S)-2-amino-4,4-dimethylpentanoic acid
  MOD_RES (4)..(4): 2-amino-2-(pent-4-en-1-yl)hept-6-enoic acid
  MOD_RES (11)..(11): (S)-3-amino-1-((pent-4-en-1-yloxy)carbonyl)pyrrolidine-3- carboxylic acid
  MOD_RES (12)..(12): (S)-2-amino-3-(thiophen-3-yl)propanoic acid
  MOD_RES (13)..(13): (S)-2-amino-3-(3,4-dichlorophenyl)propanoic acid
  C-term amino
XDXXDDAAFNXXFQ

SEQ ID NO: 1672 - protein, 14 aa, Artificial Sequence
  Description of Artificial Sequence: Synthetic peptide
  N-term Acetic Acid
  MOD_RES (1)..(1): (R)-2-allylpyrrolidine-2-carboxylic acid
  MOD_RES (3)..(3): (S)-2-amino-4,4-dimethylpentanoic acid
  MOD_RES (4)..(4): 2-amino-2-(pent-4-en-1-yl)hept-6-enoic acid
  MOD_RES (11)..(11): (S)-3-amino-1-((pent-4-en-1-yloxy)carbonyl)pyrrolidine-3- carboxylic acid
  MOD_RES (12)..(12): (S)-2-amino-3-(thiophen-3-yl)propanoic acid
  MOD_RES (13)..(13): (S)-2-amino-3-(3,4-dichlorophenyl)propanoic acid
  C-term amino
XDXXDDAAFLXXFQ

SEQ ID NO: 1673 - protein, 14 aa, Artificial Sequence
  Description of Artificial Sequence: Synthetic peptide
  N-term Acetic Acid
  MOD_RES (1)..(1): (R)-2-allylpyrrolidine-2-carboxylic acid
  MOD_RES (3)..(3): (S)-2-amino-4,4-dimethylpentanoic acid
  MOD_RES (4)..(4): 2-amino-2-(pent-4-en-1-yl)hept-6-enoic acid
  MOD_RES (6)..(6): (S)-2-amino-3-((carboxymethyl)(2,2,2-trifluoroethyl)amino) propanoic acid
  MOD_RES (9)..(9): (R)-2-amino-3-(3-(fluorosulfonyl)phenyl)propanoic acid
  MOD_RES (11)..(11): (S)-3-amino-1-((pent-4-en-1-yloxy)carbonyl)pyrrolidine-3- carboxylic acid
  MOD_RES (12)..(12): (S)-2-amino-3-(thiophen-3-yl)propanoic acid
  MOD_RES (13)..(13): (S)-2-amino-3-(benzo[b]thiophen-3-yl)propanoic acid
  C-term amino
XDXXDXAAFLXXXQ

SEQ ID NO: 1674 - protein, 14 aa, Artificial Sequence
  Description of Artificial Sequence: Synthetic peptide
  N-term Acetic Acid
  MOD_RES (1)..(1): (R)-2-allylpyrrolidine-2-carboxylic acid
  MOD_RES (3)..(3): (S)-2-amino-4,4-dimethylpentanoic acid
  MOD_RES (4)..(4): 2-amino-2-(pent-4-en-1-yl)hept-6-enoic acid
  MOD_RES (6)..(6): (S)-2-amino-3-((carboxymethyl)(2,2,2-trifluoroethyl)amino) propanoic acid
  MOD_RES (11)..(11): (S)-3-amino-1-((pent-4-en-1-yloxy)carbonyl)pyrrolidine-3- carboxylic acid
  MOD_RES (12)..(12): (S)-2-amino-3-(thiophen-3-yl)propanoic acid
  MOD_RES (13)..(13): (S)-2-amino-3-(benzo[b]thiophen-3-yl)propanoic acid
  MOD_RES (14)..(14): N6-(1-hydroxy-1,3-dihydrobenzo[c][1,2]oxaborole-6-carbonyl)lysine
  C-term amino
XDXXDXAAFLXXXK

SEQ ID NO: 1675 - protein, 14 aa, Artificial Sequence
  Description of Artificial Sequence: Synthetic peptide
  N-term Acetic Acid
  MOD_RES (1)..(1): (R)-2-allylpyrrolidine-2-carboxylic acid
  MOD_RES (3)..(3): (S)-2-amino-4,4-dimethylpentanoic acid
  MOD_RES (4)..(4): 2-amino-2-(pent-4-en-1-yl)hept-6-enoic acid
  MOD_RES (6)..(6): (S)-3-(2-amino-2-carboxyethyl)benzoic acid
  MOD_RES (7)..(7): N4-methyl-L-asparagine
  MOD_RES (11)..(11): (S)-3-amino-1-((pent-4-en-1-yloxy)carbonyl)pyrrolidine-3- carboxylic acid
  MOD_RES (12)..(12): (S)-2-amino-3-(thiophen-3-yl)propanoic acid
  MOD_RES (13)..(13): (S)-2-amino-3-(benzo[b]thiophen-3-yl)propanoic acid
  C-term amino
XDXXDXNAFLXXXA

SEQ ID NO: 1676 - protein, 14 aa, Artificial Sequence
  Description of Artificial Sequence: Synthetic peptide
  N-term Acetic Acid
  MOD_RES (1)..(1): (R)-2-allylpyrrolidine-2-carboxylic acid
  MOD_RES (3)..(3): (S)-2-amino-4,4-dimethylpentanoic acid
  MOD_RES (4)..(4): 2-amino-2-(pent-4-en-1-yl)hept-6-enoic acid
  MOD_RES (6)..(6): (S)-3-(2-amino-2-carboxyethyl)benzoic acid
  MOD_RES (7)..(7): (S)-2-aminohexanoic acid
  MOD_RES (11)..(11): (S)-3-amino-1-((pent-4-en-1-yloxy)carbonyl)pyrrolidine-3- carboxylic acid
  MOD_RES (12)..(12): (S)-2-amino-3-(thiophen-3-yl)propanoic acid
  MOD_RES (13)..(13): (S)-2-amino-3-(benzo[b]thiophen-3-yl)propanoic acid
  C-term amino
XDXXDXXAFLXXXV

SEQ ID NO: 1677 - protein, 14 aa, Artificial Sequence
  Description of Artificial Sequence: Synthetic peptide
  N-term Acetic Acid
  MOD_RES (1)..(1): (R)-2-allylpyrrolidine-2-carboxylic acid
  MOD_RES (3)..(3): (S)-2-amino-4,4-dimethylpentanoic acid
  MOD_RES (4)..(4): 2-amino-2-(pent-4-en-1-yl)hept-6-enoic acid
  MOD_RES (6)..(6): (S)-3-(2-amino-2-carboxyethyl)benzoic acid
  MOD_RES (11)..(11): (S)-3-amino-1-((pent-4-en-1-yloxy)carbonyl)pyrrolidine-3- carboxylic acid
  MOD_RES (12)..(12): (S)-2-amino-3-(thiophen-3-yl)propanoic acid
  MOD_RES (13)..(13): (S)-2-amino-3-(benzo[b]thiophen-3-yl)propanoic acid
  C-term amino
XDXXDXSAFLXXXV

SEQ ID NO: 1678 - protein, 14 aa, Artificial Sequence
  Description of Artificial Sequence: Synthetic peptide
  N-term Acetic Acid
  MOD_RES (1)..(1): (R)-2-allylpyrrolidine-2-carboxylic acid
  MOD_RES (3)..(3): (S)-2-amino-4,4-dimethylpentanoic acid
  MOD_RES (4)..(4): 2-amino-2-(pent-4-en-1-yl)hept-6-enoic acid
  MOD_RES (6)..(6): (S)-3-(2-amino-2-carboxyethyl)benzoic acid
  MOD_RES (7)..(7): N4-methyl-L-asparagine
  MOD_RES (11)..(11): (S)-3-amino-1-((pent-4-en-1-yloxy)carbonyl)pyrrolidine-3- carboxylic acid
  MOD_RES (12)..(12): (S)-2-amino-3-(thiophen-3-yl)propanoic acid
  MOD_RES (13)..(13): (S)-2-amino-3-(benzo[b]thiophen-3-yl)propanoic acid
  C-term amino
XDXXDXNAFLXXXV

SEQ ID NO: 1679 - protein, 14 aa, Artificial Sequence
  Description of Artificial Sequence: Synthetic peptide
  N-term Acetic Acid
  MOD_RES (1)..(1): (R)-2-allylpyrrolidine-2-carboxylic acid
  MOD_RES (3)..(3): (S)-2-amino-4,4-dimethylpentanoic acid
  MOD_RES (4)..(4): 2-amino-2-(pent-4-en-1-yl)hept-6-enoic acid
  MOD_RES (6)..(6): (S)-3-(2-amino-2-carboxyethyl)benzoic acid
  MOD_RES (11)..(11): (S)-3-amino-1-((pent-4-en-1-yloxy)carbonyl)pyrrolidine-3- carboxylic acid
  MOD_RES (12)..(12): (S)-2-amino-3-(thiophen-3-yl)propanoic acid
  MOD_RES (13)..(13): (S)-2-amino-3-(benzo[b]thiophen-3-yl)propanoic acid
  MOD_RES (14)..(14): (S)-2-amino-4,4-dimethylpentanoic acid
  C-term amino
XDXXDXQAFLXXXX

SEQ ID NO: 1680 - protein, 14 aa, Artificial Sequence
  Description of Artificial Sequence: Synthetic peptide
  N-term Acetic Acid
  MOD_RES (1)..(1): (R)-2-allylpyrrolidine-2-carboxylic acid
  MOD_RES (3)..(3): (S)-2-amino-4,4-dimethylpentanoic acid
  MOD_RES (4)..(4): 2-amino-2-(pent-4-en-1-yl)hept-6-enoic acid
  MOD_RES (6)..(6): (S)-3-(2-amino-2-carboxyethyl)benzoic acid
  MOD_RES (7)..(7): (S)-2-aminohexanoic acid
  MOD_RES (11)..(11): (S)-3-amino-1-((pent-4-en-1-yloxy)carbonyl)pyrrolidine-3- carboxylic acid
  MOD_RES (12)..(12): (S)-2-amino-3-(thiophen-3-yl)propanoic acid
  MOD_RES (13)..(13): (S)-2-amino-3-(benzo[b]thiophen-3-yl)propanoic acid
  MOD_RES (14)..(14): (S)-2-amino-4,4-dimethylpentanoic acid
  C-term amino
XDXXDXXAFLXXXX

SEQ ID NO: 1681 - protein, 14 aa, Artificial Sequence
  Description of Artificial Sequence: Synthetic peptide
  N-term Acetic Acid
  MOD_RES (1)..(1): (R)-2-allylpyrrolidine-2-carboxylic acid
  MOD_RES (3)..(3): (S)-2-amino-4,4-dimethylpentanoic acid
  MOD_RES (4)..(4): 2-amino-2-(pent-4-en-1-yl)hept-6-enoic acid
  MOD_RES (6)..(6): (S)-3-(2-amino-2-carboxyethyl)benzoic acid
  MOD_RES (7)..(7): 2-amino-2-methylpropanoic acid
  MOD_RES (11)..(11): (S)-3-amino-1-((pent-4-en-1-yloxy)carbonyl)pyrrolidine-3- carboxylic acid
  MOD_RES (12)..(12): (S)-2-amino-3-(thiophen-3-yl)propanoic acid
  MOD_RES (13)..(13): (S)-2-amino-3-(benzo[b]thiophen-3-yl)propanoic acid
  MOD_RES (14)..(14): (S)-2-amino-4,4-dimethylpentanoic acid
  C-term amino
XDXXDXXAFLXXXX

SEQ ID NO: 1682 - protein, 14 aa, Artificial Sequence
  Description of Artificial Sequence: Synthetic peptide
  N-term Acetic Acid
  MOD_RES (1)..(1): (R)-2-allylpyrrolidine-2-carboxylic acid
  MOD_RES (3)..(3): (S)-2-amino-4,4-dimethylpentanoic acid
  MOD_RES (4)..(4): 2-amino-2-(pent-4-en-1-yl)hept-6-enoic acid
  MOD_RES (6)..(6): (S)-3-(2-amino-2-carboxyethyl)benzoic acid
  MOD_RES (11)..(11): (S)-3-amino-1-((pent-4-en-1-yloxy)carbonyl)pyrrolidine-3- carboxylic acid
  MOD_RES (12)..(12): (S)-2-amino-3-(thiophen-3-yl)propanoic acid
  MOD_RES (13)..(13): (S)-2-amino-3-(benzo[b]thiophen-3-yl)propanoic acid
  MOD_RES (14)..(14): (S)-2-amino-4,4-dimethylpentanoic acid
  C-term amino
XDXXDXSAFLXXXX

SEQ ID NO: 1683 - protein, 14 aa, Artificial Sequence
  Description of Artificial Sequence: Synthetic peptide
  N-term Acetic Acid
  MOD_RES (1)..(1): (R)-2-allylpyrrolidine-2-carboxylic acid
  MOD_RES (3)..(3): (S)-2-amino-4,4-dimethylpentanoic acid
  MOD_RES (4)..(4): 2-amino-2-(pent-4-en-1-yl)hept-6-enoic acid
  MOD_RES (6)..(6): (S)-3-(2-amino-2-carboxyethyl)benzoic acid
  MOD_RES (7)..(7): N4-methyl-L-asparagine
  MOD_RES (11)..(11): (S)-3-amino-1-((pent-4-en-1-yloxy)carbonyl)pyrrolidine-3- carboxylic acid
  MOD_RES (12)..(12): (S)-2-amino-3-(thiophen-3-yl)propanoic acid
  MOD_RES (13)..(13): (S)-2-amino-3-(benzo[b]thiophen-3-yl)propanoic acid
  MOD_RES (14)..(14): (S)-2-amino-4,4-dimethylpentanoic acid
  C-term amino
XDXXDXNAFLXXXX

SEQ ID NO: 1684 - protein, 14 aa, Artificial Sequence
  Description of Artificial Sequence: Synthetic peptide
  N-term Acetic Acid
  MOD_RES (1)..(1): (R)-2-allylpyrrolidine-2-carboxylic acid
  MOD_RES (3)..(3): (S)-2-amino-4,4-dimethylpentanoic acid
  MOD_RES (4)..(4): 2-amino-2-(pent-4-en-1-yl)hept-6-enoic acid
  MOD_RES (11)..(11): (S)-3-amino-1-((but-3-en-1-yloxy)carbonyl)pyrrolidine-3- carboxylic acid
  MOD_RES (12)..(12): (S)-2-amino-3-(thiophen-3-yl)propanoic acid
  MOD_RES (13)..(13): (S)-2-amino-3-(benzo[b]thiophen-3-yl)propanoic acid
  C-term amino
XDXXNTAAFNXXXQ

SEQ ID NO: 1685 - protein, 14 aa, Artificial Sequence
  Description of Artificial Sequence: Synthetic peptide
  N-term Acetic Acid
  MOD_RES (1)..(1): (R)-2-allylpyrrolidine-2-carboxylic acid
  MOD_RES (3)..(3): (S)-2-amino-4,4-dimethylpentanoic acid
  MOD_RES (4)..(4): 2-amino-2-(pent-4-en-1-yl)hept-6-enoic acid
  MOD_RES (11)..(11): (S)-3-amino-1-((hex-5-en-1-yloxy)carbonyl)pyrrolidine-3- carboxylic acid
  MOD_RES (12)..(12): (S)-2-amino-3-(thiophen-3-yl)propanoic acid
  MOD_RES (13)..(13): (S)-2-amino-3-(benzo[b]thiophen-3-yl)propanoic acid
  C-term amino
XDXXNTAAFNXXXQ

SEQ ID NO: 1686 - protein, 14 aa, Artificial Sequence
  Description of Artificial Sequence: Synthetic peptide
  N-term Acetic Acid
  MOD_RES (1)..(1): (R)-2-allylpyrrolidine-2-carboxylic acid
  MOD_RES (3)..(3): (S)-2-amino-4,4-dimethylpentanoic acid
  MOD_RES (4)..(4): 2-amino-2-(pent-4-en-1-yl)hept-6-enoic acid
  MOD_RES (11)..(11): (S)-2-amino-2-methylnon-8-enoic acid
  MOD_RES (12)..(12): (S)-2-amino-3-(thiophen-3-yl)propanoic acid
  MOD_RES (13)..(13): (S)-2-amino-3-(benzo[b]thiophen-3-yl)propanoic acid
  C-term amino
XDXXNTAAFNXXXQ

SEQ ID NO: 1687 - protein, 14 aa, Artificial Sequence
  Description of Artificial Sequence: Synthetic peptide
  N-term Acetic Acid
  MOD_RES (1)..(1): (R)-2-allylpyrrolidine-2-carboxylic acid
  MOD_RES (3)..(3): (S)-2-amino-4,4-dimethylpentanoic acid
  MOD_RES (4)..(4): 2-amino-2-(pent-4-en-1-yl)hept-6-enoic acid
  MOD_RES (11)..(11): 1-((allyloxy)carbonyl)-3-aminoazetidine-3-carboxylic acid
  MOD_RES (12)..(12): (S)-2-amino-3-(thiophen-3-yl)propanoic acid
  MOD_RES (13)..(13): (S)-2-amino-3-(benzo[b]thiophen-3-yl)propanoic acid
  C-term amino
XDXXNTAAFNXXXQ

SEQ ID NO: 1688 - protein, 14 aa, Artificial Sequence
  Description of Artificial Sequence: Synthetic peptide
  N-term Acetic Acid
  MOD_RES (1)..(1): (R)-2-allylpyrrolidine-2-carboxylic acid
  MOD_RES (3)..(3): (S)-2-amino-4,4-dimethylpentanoic acid
  MOD_RES (4)..(4): 2-amino-2-(pent-4-en-1-yl)hept-6-enoic acid
  MOD_RES (6)..(6): (S)-5-(2-amino-2-carboxyethyl)-2-fluorobenzoic acid
  MOD_RES (11)..(11): (S)-3-amino-1-((pent-4-en-1-yloxy)carbonyl)pyrrolidine-3- carboxylic acid
  MOD_RES (12)..(12): (S)-2-amino-3-(thiophen-3-yl)propanoic acid
  MOD_RES (13)..(13): (S)-2-amino-3-(benzo[b]thiophen-3-yl)propanoic acid
  C-term amino
XDXXDXAAFLXXXS

SEQ ID NO: 1689 - protein, 14 aa, Artificial Sequence
  Description of Artificial Sequence: Synthetic peptide
  N-term Acetic Acid
  MOD_RES (1)..(1): (R)-2-allylpyrrolidine-2-carboxylic acid
  MOD_RES (3)..(3): (S)-2-amino-4,4-dimethylpentanoic acid
  MOD_RES (4)..(4): 2-amino-2-(pent-4-en-1-yl)hept-6-enoic acid
  MOD_RES (6)..(6): (S)-5-(2-amino-2-carboxyethyl)-2-fluorobenzoic acid
  MOD_RES (11)..(11): (S)-3-amino-1-((pent-4-en-1-yloxy)carbonyl)pyrrolidine-3- carboxylic acid
  MOD_RES (12)..(12): (S)-2-amino-3-(2-chlorophenyl)propanoic acid
  MOD_RES (13)..(13): (S)-2-amino-3-(benzo[b]thiophen-3-yl)propanoic acid
  C-term amino
XDXXDXAAFLXFXQ

SEQ ID NO: 1690 - protein, 14 aa, Artificial Sequence
  Description of Artificial Sequence: Synthetic peptide
  N-term Acetic Acid
  MOD_RES (1)..(1): (R)-2-allylpyrrolidine-2-carboxylic acid
  MOD_RES (3)..(3): (S)-2-amino-4,4-dimethylpentanoic acid
  MOD_RES (4)..(4): 2-amino-2-(pent-4-en-1-yl)hept-6-enoic acid
  MOD_RES (6)..(6): (S)-5-(2-amino-2-carboxyethyl)-2-fluorobenzoic acid
  MOD_RES (11)..(11): (S)-3-amino-1-((pent-4-en-1-yloxy)carbonyl)pyrrolidine-3- carboxylic acid
  MOD_RES (12)..(12): (S)-2-amino-3-(2-chlorophenyl)propanoic acid
  MOD_RES (13)..(13): (S)-2-amino-3-(benzo[b]thiophen-3-yl)propanoic acid
  C-term amino
XDXXDXAAFLXFXS

SEQ ID NO: 1691 - protein, 14 aa, Artificial Sequence
  Description of Artificial Sequence: Synthetic peptide
  N-term Acetic Acid
  MOD_RES (1)..(1): (R)-2-allylpyrrolidine-2-carboxylic acid
  MOD_RES (3)..(3): (S)-2-amino-4,4-dimethylpentanoic acid
  MOD_RES (4)..(4): 2-amino-2-(pent-4-en-1-yl)hept-6-enoic acid
  MOD_RES (6)..(6): (S)-5-(2-amino-2-carboxyethyl)-2-fluorobenzoic acid
  MOD_RES (11)..(11): (S)-3-amino-1-((pent-4-en-1-yloxy)carbonyl)pyrrolidine-3- carboxylic acid
  MOD_RES (12)..(12): (S)-2-amino-3-(thiophen-3-yl)propanoic acid
  MOD_RES (13)..(13): (S)-2-amino-3-(benzo[b]thiophen-3-yl)propanoic acid
  C-term amino
XDXXDXQAFLXXXA

SEQ ID NO: 1692 - protein, 14 aa, Artificial Sequence
  Description of Artificial Sequence: Synthetic peptide
  N-term Acetic Acid
  MOD_RES (1)..(1): (R)-2-allylpyrrolidine-2-carboxylic acid
  MOD_RES (3)..(3): (S)-2-amino-4,4-dimethylpentanoic acid
  MOD_RES (4)..(4): 2-amino-2-(pent-4-en-1-yl)hept-6-enoic acid
  MOD_RES (6)..(6): (S)-5-(2-amino-2-carboxyethyl)-2-fluorobenzoic acid
  MOD_RES (7)..(7): 2-amino-2-methylpropanoic acid
  MOD_RES (11)..(11): (S)-3-amino-1-((pent-4-en-1-yloxy)carbonyl)pyrrolidine-3- carboxylic acid
  MOD_RES (12)..(12): (S)-2-amino-3-(thiophen-3-yl)propanoic acid
  MOD_RES (13)..(13): (S)-2-amino-3-(benzo[b]thiophen-3-yl)propanoic acid
  C-term amino
XDXXDXXAFLXXXA

SEQ ID NO: 1693 - protein, 14 aa, Artificial Sequence
  Description of Artificial Sequence: Synthetic peptide
  N-term Acetic Acid
  MOD_RES (1)..(1): (R)-2-allylpyrrolidine-2-carboxylic acid
  MOD_RES (3)..(3): (S)-2-amino-4,4-dimethylpentanoic acid
  MOD_RES (4)..(4): 2-amino-2-(pent-4-en-1-yl)hept-6-enoic acid
  MOD_RES (6)..(6): (S)-3-(2-amino-2-carboxyethyl)-5-(trifluoromethyl)benzoic acid
  MOD_RES (11)..(11): (S)-3-amino-1-((pent-4-en-1-yloxy)carbonyl)pyrrolidine-3- carboxylic acid
  MOD_RES (12)..(12): (S)-2-amino-3-(thiophen-3-yl)propanoic acid
  MOD_RES (13)..(13): (S)-2-amino-3-(benzo[b]thiophen-3-yl)propanoic acid
  C-term amino
XDXXDXAAFLXXXQ

SEQ ID NO: 1694 - protein, 14 aa, Artificial Sequence
  Description of Artificial Sequence: Synthetic peptide
  N-term Acetic Acid
  MOD_RES (1)..(1): (R)-2-allylpyrrolidine-2-carboxylic acid
  MOD_RES (3)..(3): (S)-2-amino-4,4-dimethylpentanoic acid
  MOD_RES (4)..(4): 2-amino-2-(pent-4-en-1-yl)hept-6-enoic acid
  MOD_RES (6)..(6): (S)-3-(2-amino-2-carboxyethyl)-5-(trifluoromethyl)benzoic acid
  MOD_RES (11)..(11): (S)-3-amino-1-((pent-4-en-1-yloxy)carbonyl)pyrrolidine-3- carboxylic acid
  MOD_RES (12)..(12): (S)-2-amino-3-(thiophen-3-yl)propanoic acid
  MOD_RES (13)..(13): (S)-2-amino-3-(benzo[b]thiophen-3-yl)propanoic acid
  C-term amino
XDXXDXAAFLXXXS

SEQ ID NO: 1695 - protein, 14 aa, Artificial Sequence
  Description of Artificial Sequence: Synthetic peptide
  N-term Acetic Acid
  MOD_RES (1)..(1): (R)-2-allylpyrrolidine-2-carboxylic acid
  MOD_RES (3)..(3): (S)-2-amino-4,4-dimethylpentanoic acid
  MOD_RES (4)..(4): 2-amino-2-(pent-4-en-1-yl)hept-6-enoic acid
  MOD_RES (6)..(6): (S)-3-(2-amino-2-carboxyethyl)-5-(trifluoromethyl)benzoic acid
  MOD_RES (11)..(11): (S)-3-amino-1-((pent-4-en-1-yloxy)carbonyl)pyrrolidine-3- carboxylic acid
  MOD_RES (12)..(12): (S)-2-amino-3-(2-chlorophenyl)propanoic acid
  MOD_RES (13)..(13): (S)-2-amino-3-(benzo[b]thiophen-3-yl)propanoic acid
  C-term amino
XDXXDXAAFLXFXS

SEQ ID NO: 1696 - protein, 14 aa, Artificial Sequence
  Description of Artificial Sequence: Synthetic peptide
  N-term Acetic Acid
  MOD_RES (1)..(1): (R)-2-allylpyrrolidine-2-carboxylic acid
  MOD_RES (3)..(3): (S)-2-amino-4,4-dimethylpentanoic acid
  MOD_RES (4)..(4): 2-amino-2-(pent-4-en-1-yl)hept-6-enoic acid
  MOD_RES (6)..(6): (S)-3-(2-amino-2-carboxyethyl)-5-(trifluoromethyl)benzoic acid
  MOD_RES (11)..(11): (S)-3-amino-1-((pent-4-en-1-yloxy)carbonyl)pyrrolidine-3- carboxylic acid
  MOD_RES (12)..(12): (S)-2-amino-3-(thiophen-3-yl)propanoic acid
  MOD_RES (13)..(13): (S)-2-amino-3-(benzo[b]thiophen-3-yl)propanoic acid
  C-term amino
XDXXDXQAFLXXXA

SEQ ID NO: 1697 - protein, 14 aa, Artificial Sequence
  Description of Artificial Sequence: Synthetic peptide
  N-term Acetic Acid
  MOD_RES (1)..(1): (R)-2-allylpyrrolidine-2-carboxylic acid
  MOD_RES (3)..(3): (S)-2-amino-4,4-dimethylpentanoic acid
  MOD_RES (4)..(4): 2-amino-2-(pent-4-en-1-yl)hept-6-enoic acid
  MOD_RES (6)..(6): (S)-3-(2-amino-2-carboxyethyl)-5-(trifluoromethyl)benzoic acid
  MOD_RES (7)..(7): 2-amino-2-methylpropanoic acid
  MOD_RES (11)..(11): (S)-3-amino-1-((pent-4-en-1-yloxy)carbonyl)pyrrolidine-3- carboxylic acid
  MOD_RES (12)..(12): (S)-2-amino-3-(thiophen-3-yl)propanoic acid
  MOD_RES (13)..(13): (S)-2-amino-3-(benzo[b]thiophen-3-yl)propanoic acid
  C-term amino
XDXXDXXAFLXXXA

SEQ ID NO: 1698 - protein, 14 aa, Artificial Sequence
  Description of Artificial Sequence: Synthetic peptide
  N-term Acetic Acid
  MOD_RES (1)..(1): (R)-2-allylpyrrolidine-2-carboxylic acid
  MOD_RES (3)..(3): (S)-2-amino-4,4-dimethylpentanoic acid
  MOD_RES (4)..(4): 2-amino-2-(pent-4-en-1-yl)hept-6-enoic acid
  MOD_RES (11)..(11): (S)-4-(((allyloxy)carbonyl)(methyl)amino)-2-amino-2- methylbutanoic acid
  MOD_RES (12)..(12): (S)-2-amino-3-(thiophen-3-yl)propanoic acid
  MOD_RES (13)..(13): (S)-2-amino-3-(benzo[b]thiophen-3-yl)propanoic acid
  C-term amino
XDXXNTAAFNXXXQ

SEQ ID NO: 1699 - protein, 14 aa, Artificial Sequence
  Description of Artificial Sequence: Synthetic peptide
  N-term Acetic Acid
  MOD_RES (1)..(1): (R)-2-allylpyrrolidine-2-carboxylic acid
  MOD_RES (3)..(3): (S)-2-amino-4,4-dimethylpentanoic acid
  MOD_RES (4)..(4): 2-amino-2-(pent-4-en-1-yl)hept-6-enoic acid
  MOD_RES (6)..(6): (S)-3-(2-amino-2-carboxyethyl)benzoic acid
  MOD_RES (11)..(11): (S)-3-amino-1-((pent-4-en-1-yloxy)carbonyl)pyrrolidine-3- carboxylic acid
  MOD_RES (12)..(12): (S)-3-([1,1'-biphenyl]-3-yl)-2-aminopropanoic acid
  C-term amino
XDXXDXAAFLXXFQ

SEQ ID NO: 1700 - protein, 14 aa, Artificial Sequence
  Description of Artificial Sequence: Synthetic peptide
  N-term Acetic Acid
  MOD_RES (1)..(1): (R)-2-allylpyrrolidine-2-carboxylic acid
  MOD_RES (3)..(3): (S)-2-amino-4,4-dimethylpentanoic acid
  MOD_RES (4)..(4): 2-amino-2-(pent-4-en-1-yl)hept-6-enoic acid
  MOD_RES (6)..(6): (S)-3-(2-amino-2-carboxyethyl)benzoic acid
  MOD_RES (11)..(11): (S)-3-amino-1-((pent-4-en-1-yloxy)carbonyl)pyrrolidine-3- carboxylic acid
  MOD_RES (12)..(12): (S)-2-amino-3-(3-cyclopropylphenyl)propanoic acid
  C-term amino
XDXXDXAAFLXFFQ

SEQ ID NO: 1701 - protein, 14 aa, Artificial Sequence
  Description of Artificial Sequence: Synthetic peptide
  N-term Acetic Acid
  MOD_RES (1)..(1): (R)-2-allylpyrrolidine-2-carboxylic acid
  MOD_RES (3)..(3): (S)-2-amino-4,4-dimethylpentanoic acid
  MOD_RES (4)..(4): 2-amino-2-(pent-4-en-1-yl)hept-6-enoic acid
  MOD_RES (6)..(6): (S)-3-(2-amino-2-carboxyethyl)benzoic acid
  MOD_RES (11)..(11): (S)-3-amino-1-((pent-4-en-1-yloxy)carbonyl)pyrrolidine-3- carboxylic acid
  MOD_RES (12)..(12): (S)-2-amino-3-(thiophen-3-yl)propanoic acid
  MOD_RES (13)..(13): (S)-2-amino-3-(3,4-dichlorophenyl)propanoic acid
  C-term amino
XDXXDXAAFLXXFQ

SEQ ID NO: 1702 - protein, 14 aa, Artificial Sequence
  Description of Artificial Sequence: Synthetic peptide
  N-term Acetic Acid
  MOD_RES (1)..(1): (R)-2-allylpyrrolidine-2-carboxylic acid
  MOD_RES (3)..(3): (S)-2-amino-4,4-dimethylpentanoic acid
  MOD_RES (4)..(4): 2-amino-2-(pent-4-en-1-yl)hept-6-enoic acid
  MOD_RES (6)..(6): (S)-3-(2-amino-2-carboxyethyl)benzoic acid
  MOD_RES (11)..(11): (S)-3-amino-1-((pent-4-en-1-yloxy)carbonyl)pyrrolidine-3- carboxylic acid
  MOD_RES (12)..(12): (S)-2-amino-3-(thiophen-3-yl)propanoic acid
  MOD_RES (13)..(13): (S)-2-amino-3-(3,4-dichlorophenyl)propanoic acid
  C-term amino
XDXXDXQAFVXXFA

SEQ ID NO: 1703 - protein, 14 aa, Artificial Sequence
  Description of Artificial Sequence: Synthetic peptide
  N-term Acetic Acid
  MOD_RES (1)..(1): (R)-2-allylpyrrolidine-2-carboxylic acid
  MOD_RES (3)..(3): (S)-2-amino-4,4-dimethylpentanoic acid
  MOD_RES (4)..(4): 2-amino-2-(pent-4-en-1-yl)hept-6-enoic acid
  MOD_RES (6)..(6): (S)-3-(2-amino-2-carboxyethyl)benzoic acid
  MOD_RES (11)..(11): (S)-3-amino-1-((pent-4-en-1-yloxy)carbonyl)pyrrolidine-3- carboxylic acid
  MOD_RES (12)..(12): (S)-2-amino-3-(2-(trifluoromethyl)phenyl)propanoic acid
  MOD_RES (13)..(13): (S)-2-amino-3-(3,4-dichlorophenyl)propanoic acid
  C-term amino
XDXXDXAAFLXFFS

SEQ ID NO: 1704 - protein, 14 aa, Artificial Sequence
  Description of Artificial Sequence: Synthetic peptide
  N-term Acetic Acid
  MOD_RES (1)..(1): (R)-2-allylpyrrolidine-2-carboxylic acid
  MOD_RES (3)..(3): (S)-2-amino-4,4-dimethylpentanoic acid
  MOD_RES (4)..(4): 2-amino-2-(pent-4-en-1-yl)hept-6-enoic acid
  MOD_RES (6)..(6): (S)-3-(2-amino-2-carboxyethyl)benzoic acid
  MOD_RES (11)..(11): (S)-3-amino-1-((pent-4-en-1-yloxy)carbonyl)pyrrolidine-3- carboxylic acid
  MOD_RES (12)..(12): (S)-2-amino-3-(2-(trifluoromethyl)phenyl)propanoic acid
  MOD_RES (13)..(13): (S)-2-amino-3-(3,4-dichlorophenyl)propanoic acid
  C-term amino
XDXXDXQAFLXFFA

SEQ ID NO: 1705 - protein, 14 aa, Artificial Sequence
  Description of Artificial Sequence: Synthetic peptide
  N-term Acetic Acid
  MOD_RES (1)..(1): (R)-2-allylpyrrolidine-2-carboxylic acid
  MOD_RES (3)..(3): (S)-2-amino-4,4-dimethylpentanoic acid
  MOD_RES (4)..(4): 2-amino-2-(pent-4-en-1-yl)hept-6-enoic acid
  MOD_RES (6)..(6): (S)-3-(2-amino-2-carboxyethyl)benzoic acid
  MOD_RES (11)..(11): (S)-3-amino-1-((pent-4-en-1-yloxy)carbonyl)pyrrolidine-3- carboxylic acid
  MOD_RES (12)..(12): (S)-2-amino-3-(thiophen-3-yl)propanoic acid
  MOD_RES (13)..(13): (S)-2-amino-3-(4-chlorophenyl)propanoic acid
  C-term amino
XDXXDXAAFLXXFQ

SEQ ID NO: 1706 - protein, 14 aa, Artificial Sequence
  Description of Artificial Sequence: Synthetic peptide
  N-term Acetic Acid
  MOD_RES (1)..(1): (R)-2-allylpyrrolidine-2-carboxylic acid
  MOD_RES (3)..(3): (S)-2-amino-4,4-dimethylpentanoic acid
  MOD_RES (4)..(4): 2-amino-2-(pent-4-en-1-yl)hept-6-enoic acid
  MOD_RES (6)..(6): (S)-3-(2-amino-2-carboxyethyl)benzoic acid
  MOD_RES (11)..(11): (S)-3-amino-1-((pent-4-en-1-yloxy)carbonyl)pyrrolidine-3- carboxylic acid
  MOD_RES (12)..(12): (S)-2-amino-3-(thiophen-3-yl)propanoic acid
  MOD_RES (13)..(13): (S)-2-amino-3-(4-chlorophenyl)propanoic acid
  C-term amino
XDXXDXQAFVXXFA

SEQ ID NO: 1707 - protein, 14 aa, Artificial Sequence
  Description of Artificial Sequence: Synthetic peptide
  N-term Acetic Acid
  MOD_RES (1)..(1): (R)-2-allylpyrrolidine-2-carboxylic acid
  MOD_RES (3)..(3): (S)-2-amino-4,4-dimethylpentanoic acid
  MOD_RES (4)..(4): 2-amino-2-(pent-4-en-1-yl)hept-6-enoic acid
  MOD_RES (6)..(6): (S)-3-(2-amino-2-carboxyethyl)benzoic acid
  MOD_RES (11)..(11): (S)-3-amino-1-((pent-4-en-1-yloxy)carbonyl)pyrrolidine-3- carboxylic acid
  MOD_RES (12)..(12): (S)-2-amino-3-(2-(trifluoromethyl)phenyl)propanoic acid
  MOD_RES (13)..(13): (S)-2-amino-3-(4-chlorophenyl)propanoic acid
  C-term amino
XDXXDXAAFLXFFS

SEQ ID NO: 1708 - protein, 14 aa, Artificial Sequence
  Description of Artificial Sequence: Synthetic peptide
  N-term Acetic Acid
  MOD_RES (1)..(1): (R)-2-allylpyrrolidine-2-carboxylic acid
  MOD_RES (3)..(3): (S)-2-amino-4,4-dimethylpentanoic acid
  MOD_RES (4)..(4): 2-amino-2-(pent-4-en-1-yl)hept-6-enoic acid
  MOD_RES (6)..(6): (S)-3-(2-amino-2-carboxyethyl)benzoic acid
  MOD_RES (11)..(11): (S)-3-amino-1-((pent-4-en-1-yloxy)carbonyl)pyrrolidine-3- carboxylic acid
  MOD_RES (12)..(12): (S)-2-amino-3-(2-(trifluoromethyl)phenyl)propanoic acid
  MOD_RES (13)..(13): (S)-2-amino-3-(4-chlorophenyl)propanoic acid
  C-term amino
XDXXDXQAFLXFFA

SEQ ID NO: 1709 - protein, 14 aa, Artificial Sequence
  Description of Artificial Sequence: Synthetic peptide
  N-term Acetic Acid
  MOD_RES (1)..(1): (R)-2-allylpyrrolidine-2-carboxylic acid
  MOD_RES (3)..(3): (S)-2-amino-4,4-dimethylpentanoic acid
  MOD_RES (4)..(4): 2-amino-2-(pent-4-en-1-yl)hept-6-enoic acid
  MOD_RES (6)..(6): (S)-3-(2-amino-2-carboxyethyl)benzoic acid
  MOD_RES (11)..(11): (S)-3-amino-1-((pent-4-en-1-yloxy)carbonyl)pyrrolidine-3- carboxylic acid
  MOD_RES (12)..(12): (S)-2-amino-3-(thiophen-3-yl)propanoic acid
  MOD_RES (13)..(13): (S)-2-amino-3-(3-chlorophenyl)propanoic acid
  C-term amino
XDXXDXAAFLXXFQ

SEQ ID NO: 1710 - protein, 14 aa, Artificial Sequence
  Description of Artificial Sequence: Synthetic peptide
  N-term Acetic Acid
  MOD_RES (1)..(1): (R)-2-allylpyrrolidine-2-carboxylic acid
  MOD_RES (3)..(3): (S)-2-amino-4,4-dimethylpentanoic acid
  MOD_RES (4)..(4): 2-amino-2-(pent-4-en-1-yl)hept-6-enoic acid
  MOD_RES (6)..(6): (S)-3-(2-amino-2-carboxyethyl)benzoic acid
  MOD_RES (11)..(11): (S)-3-amino-1-((pent-4-en-1-yloxy)carbonyl)pyrrolidine-3- carboxylic acid
  MOD_RES (12)..(12): (S)-2-amino-3-(thiophen-3-yl)propanoic acid
  MOD_RES (13)..(13): (S)-2-amino-3-(3-chlorophenyl)propanoic acid
  C-term amino
XDXXDXQAFVXXFA

SEQ ID NO: 1711 - protein, 14 aa, Artificial Sequence
  Description of Artificial Sequence: Synthetic peptide
  N-term Acetic Acid
  MOD_RES (1)..(1): (R)-2-allylpyrrolidine-2-carboxylic acid
  MOD_RES (3)..(3): (S)-2-amino-4,4-dimethylpentanoic acid
  MOD_RES (4)..(4): 2-amino-2-(pent-4-en-1-yl)hept-6-enoic acid
  MOD_RES (6)..(6): (S)-3-(2-amino-2-carboxyethyl)benzoic acid
  MOD_RES (11)..(11): (S)-3-amino-1-((pent-4-en-1-yloxy)carbonyl)pyrrolidine-3- carboxylic acid
  MOD_RES (12)..(12): (S)-2-amino-3-(2-(trifluoromethyl)phenyl)propanoic acid
  MOD_RES (13)..(13): (S)-2-amino-3-(3-chlorophenyl)propanoic acid
  C-term amino
XDXXDXAAFLXFFS

SEQ ID NO: 1712 - protein, 14 aa, Artificial Sequence
  Description of Artificial Sequence: Synthetic peptide
  N-term Acetic Acid
  MOD_RES (1)..(1): (R)-2-allylpyrrolidine-2-carboxylic acid
  MOD_RES (3)..(3): (S)-2-amino-4,4-dimethylpentanoic acid
  MOD_RES (4)..(4): 2-amino-2-(pent-4-en-1-yl)hept-6-enoic acid
  MOD_RES (6)..(6): (S)-3-(2-amino-2-carboxyethyl)benzoic acid
  MOD_RES (11)..(11): (S)-3-amino-1-((pent-4-en-1-yloxy)carbonyl)pyrrolidine-3- carboxylic acid
  MOD_RES (12)..(12): (S)-2-amino-3-(2-(trifluoromethyl)phenyl)propanoic acid
  MOD_RES (13)..(13): (S)-2-amino-3-(3-chlorophenyl)propanoic acid
  C-term amino
XDXXDXQAFLXFFA

SEQ ID NO: 1713 - protein, 14 aa, Artificial Sequence
  Description of Artificial Sequence: Synthetic peptide
  N-term Acetic Acid
  MOD_RES (1)..(1): (S)-2-methylpyrrolidine-2-carboxylic acid
  MOD_RES (3)..(3): (S)-2-amino-4,4-dimethylpentanoic acid
  MOD_RES (4)..(4): 2-amino-2-methylpropanoic acid
  MOD_RES (11)..(11): 2-amino-2-methylpropanoic acid
  MOD_RES (12)..(12): (S)-2-amino-3-(thiophen-3-yl)propanoic acid
  MOD_RES (13)..(13): (S)-2-amino-3-(benzo[b]thiophen-3-yl)propanoic acid
  C-term amino
XDXXDDAAFQXXXH

SEQ ID NO: 1714 - protein, 15 aa, Artificial Sequence
  Description of Artificial Sequence: Synthetic peptide
  N-term Acetic Acid
  MOD_RES (1)..(1): (R)-2-allylpyrrolidine-2-carboxylic acid
  MOD_RES (3)..(3): (S)-2-amino-4,4-dimethylpentanoic acid
  MOD_RES (4)..(4): 2-amino-2-(pent-4-en-1-yl)hept-6-enoic acid
  MOD_RES (11)..(11): (S)-3-amino-1-((pent-4-en-1-yloxy)carbonyl)pyrrolidine-3- carboxylic acid
  MOD_RES (12)..(12): (S)-2-amino-3-(thiophen-3-yl)propanoic acid
  MOD_RES (13)..(13): (S)-2-amino-3-(benzo[b]thiophen-3-yl)propanoic acid
  C-term amino
XDXXDDAAFQXXXHK

SEQ ID NO: 1715 - protein, 15 aa, Artificial Sequence
  Description of Artificial Sequence: Synthetic peptide
  N-term Acetic Acid
  MOD_RES (1)..(1): (S)-2-methylpyrrolidine-2-carboxylic acid
  MOD_RES (3)..(3): (S)-2-amino-4,4-dimethylpentanoic acid
  MOD_RES (4)..(4): 2-amino-2-methylpropanoic acid
  MOD_RES (11)..(11): 2-amino-2-methylpropanoic acid
  MOD_RES (12)..(12): (S)-2-amino-3-(thiophen-3-yl)propanoic acid
  MOD_RES (13)..(13): (S)-2-amino-3-(benzo[b]thiophen-3-yl)propanoic acid
  C-term amino
XDXXDDAAFQXXXHK

SEQ ID NO: 1716 - protein, 15 aa, Artificial Sequence
  Description of Artificial Sequence: Synthetic peptide
  N-term Acetic Acid
  MOD_RES (1)..(1): (S)-2-methylpyrrolidine-2-carboxylic acid
  MOD_RES (4)..(4): 2-amino-2-methylpropanoic acid
  MOD_RES (5)..(5): (S)-2-amino-3-(benzo[b]thiophen-3-yl)propanoic acid
  MOD_RES (6)..(6): (S)-2-amino-3-(thiophen-3-yl)propanoic acid
  MOD_RES (10)..(10): (S)-2-amino-4,4-dimethylpentanoic acid
  MOD_RES (11)..(11): 2-amino-2-methylpropanoic acid
  C-term amino
XHQXXXAFDXXDADK

SEQ ID NO: 1717 - protein, 14 aa, Artificial Sequence
  Description of Artificial Sequence: Synthetic peptide
  N-term Acetic Acid
  MOD_RES (1)..(1): (R)-2-allylpyrrolidine-2-carboxylic acid
  MOD_RES (3)..(3): (S)-2-amino-4,4-dimethylpentanoic acid
  MOD_RES (4)..(4): 2-amino-2-(pent-4-en-1-yl)hept-6-enoic acid
  MOD_RES (6)..(6): (S)-2-amino-3-(N-(carboxymethyl)-4-(dimethylamino)butanamido) propanoic acid
  MOD_RES (11)..(11): (S)-3-amino-1-((pent-4-en-1-yloxy)carbonyl)pyrrolidine-3- carboxylic acid
  MOD_RES (12)..(12): (S)-2-amino-3-(thiophen-3-yl)propanoic acid
  MOD_RES (13)..(13): (S)-2-amino-3-(benzo[b]thiophen-3-yl)propanoic acid
  C-term amino
XDXXDXAAFLXXXQ

SEQ ID NO: 1718 - protein, 14 aa, Artificial Sequence
  Description of Artificial Sequence: Synthetic peptide
  N-term Acetic Acid
  MOD_RES (1)..(1): (R)-2-allylpyrrolidine-2-carboxylic acid
  MOD_RES (3)..(3): (S)-2-amino-4,4-dimethylpentanoic acid
  MOD_RES (4)..(4): 2-amino-2-(pent-4-en-1-yl)hept-6-enoic acid
  MOD_RES (6)..(6): (S)-2-amino-3-(N-(carboxymethyl)-3-(dimethylamino)propanamido) propanoic acid
  MOD_RES (11)..(11): (S)-3-amino-1-((pent-4-en-1-yloxy)carbonyl)pyrrolidine-3- carboxylic acid
  MOD_RES (12)..(12): (S)-2-amino-3-(thiophen-3-yl)propanoic acid
  MOD_RES (13)..(13): (S)-2-amino-3-(benzo[b]thiophen-3-yl)propanoic acid
  C-term amino
XDXXDXAAFLXXXQ

SEQ ID NO: 1719 - protein, 14 aa, Artificial Sequence
  Description of Artificial Sequence: Synthetic peptide
  N-term Acetic Acid
  MOD_RES (1)..(1): (R)-2-allylpyrrolidine-2-carboxylic acid
  MOD_RES (3)..(3): (S)-2-amino-4,4-dimethylpentanoic acid
  MOD_RES (4)..(4): 2-amino-2-(pent-4-en-1-yl)hept-6-enoic acid
  MOD_RES (6)..(6): (S)-2-amino-3-(N-(carboxymethyl)-1-methylpiperidine-4-carboxamido )propanoic acid
  MOD_RES (11)..(11): (S)-3-amino-1-((pent-4-en-1-yloxy)carbonyl)pyrrolidine-3- carboxylic acid
  MOD_RES (12)..(12): (S)-2-amino-3-(thiophen-3-yl)propanoic acid
  MOD_RES (13)..(13): (S)-2-amino-3-(benzo[b]thiophen-3-yl)propanoic acid
  C-term amino
XDXXDXAAFLXXXQ

SEQ ID NO: 1720 - protein, 14 aa, Artificial Sequence
  Description of Artificial Sequence: Synthetic peptide
  N-term Acetic Acid
  MOD_RES (1)..(1): (R)-2-allylpyrrolidine-2-carboxylic acid
  MOD_RES (3)..(3): (S)-2-amino-4,4-dimethylpentanoic acid
  MOD_RES (4)..(4): 2-amino-2-(pent-4-en-1-yl)hept-6-enoic acid
  MOD_RES (6)..(6): (S)-2-amino-3-(N-(carboxymethyl)-2-(4-(trifluoromethyl)phenyl) acetamido)propanoic acid
  MOD_RES (11)..(11): (S)-3-amino-1-((pent-4-en-1-yloxy)carbonyl)pyrrolidine-3- carboxylic acid
  MOD_RES (12)..(12): (S)-2-amino-3-(thiophen-3-yl)propanoic acid
  MOD_RES (13)..(13): (S)-2-amino-3-(benzo[b]thiophen-3-yl)propanoic acid
  C-term amino
XDXXDXAAFLXXXQ

SEQ ID NO: 1721 - protein, 14 aa, Artificial Sequence
  Description of Artificial Sequence: Synthetic peptide
  N-term Acetic Acid
  MOD_RES (1)..(1): (R)-2-allylpyrrolidine-2-carboxylic acid
  MOD_RES (3)..(3): (S)-2-amino-4,4-dimethylpentanoic acid
  MOD_RES (4)..(4): 2-amino-2-(pent-4-en-1-yl)hept-6-enoic acid
  MOD_RES (6)..(6): (S)-2-amino-3-(N-(carboxymethyl)picolinamido)propanoic acid
  MOD_RES (11)..(11): (S)-3-amino-1-((pent-4-en-1-yloxy)carbonyl)pyrrolidine-3- carboxylic acid
  MOD_RES (12)..(12): (S)-2-amino-3-(thiophen-3-yl)propanoic acid
  MOD_RES (13)..(13): (S)-2-amino-3-(benzo[b]thiophen-3-yl)propanoic acid
  C-term amino
XDXXDXAAFLXXXQ

SEQ ID NO: 1722 - protein, 14 aa, Artificial Sequence
  Description of Artificial Sequence: Synthetic peptide
  N-term Acetic Acid
  MOD_RES (1)..(1): (R)-2-allylpyrrolidine-2-carboxylic acid
  MOD_RES (3)..(3): (S)-2-amino-4,4-dimethylpentanoic acid
  MOD_RES (4)..(4): 2-amino-2-(pent-4-en-1-yl)hept-6-enoic acid
  MOD_RES (6)..(6): (S)-2-amino-3-(N-(carboxymethyl)-4-(morpholinomethyl)benzamido) propanoic acid
  MOD_RES (11)..(11): (S)-3-amino-1-((pent-4-en-1-yloxy)carbonyl)pyrrolidine-3- carboxylic acid
  MOD_RES (12)..(12): (S)-2-amino-3-(thiophen-3-yl)propanoic acid
  MOD_RES (13)..(13): (S)-2-amino-3-(benzo[b]thiophen-3-yl)propanoic acid
  C-term amino
XDXXDXAAFLXXXQ

SEQ ID NO: 1723 - protein, 14 aa, Artificial Sequence
  Description of Artificial Sequence: Synthetic peptide
  N-term Acetic Acid
  MOD_RES (1)..(1): (R)-2-allylpyrrolidine-2-carboxylic acid
  MOD_RES (3)..(3): (S)-2-amino-4,4-dimethylpentanoic acid
  MOD_RES (4)..(4): 2-amino-2-(pent-4-en-1-yl)hept-6-enoic acid
  MOD_RES (6)..(6): (S)-2-amino-3-(N-(carboxymethyl)-2-morpholinoacetamido) propanoic acid
  MOD_RES (11)..(11): (S)-3-amino-1-((pent-4-en-1-yloxy)carbonyl)pyrrolidine-3- carboxylic acid
  MOD_RES (12)..(12): (S)-2-amino-3-(thiophen-3-yl)propanoic acid
  MOD_RES (13)..(13): (S)-2-amino-3-(benzo[b]thiophen-3-yl)propanoic acid
  C-term amino
XDXXDXAAFLXXXQ

SEQ ID NO: 1724 - protein, 14 aa, Artificial Sequence
  Description of Artificial Sequence: Synthetic peptide
  N-term Acetic Acid
  MOD_RES (1)..(1): (R)-2-allylpyrrolidine-2-carboxylic acid
  MOD_RES (3)..(3): (S)-2-amino-4,4-dimethylpentanoic acid
  MOD_RES (4)..(4): 2-amino-2-(pent-4-en-1-yl)hept-6-enoic acid
  MOD_RES (6)..(6): (S)-2-amino-3-(N-(carboxymethyl)-2-(4-methylpiperazin-1-yl) acetamido)propanoic acid
  MOD_RES (11)..(11): (S)-3-amino-1-((pent-4-en-1-yloxy)carbonyl)pyrrolidine-3- carboxylic acid
  MOD_RES (12)..(12): (S)-2-amino-3-(thiophen-3-yl)propanoic acid
  MOD_RES (13)..(13): (S)-2-amino-3-(benzo[b]thiophen-3-yl)propanoic acid
  C-term amino
XDXXDXAAFLXXXQ

SEQ ID NO: 1725 - protein, 14 aa, Artificial Sequence
  Description of Artificial Sequence: Synthetic peptide
  N-term Acetic Acid
  MOD_RES (1)..(1): (R)-2-allylpyrrolidine-2-carboxylic acid
  MOD_RES (3)..(3): (S)-2-amino-4,4-dimethylpentanoic acid
  MOD_RES (4)..(4): 2-amino-2-(pent-4-en-1-yl)hept-6-enoic acid
  MOD_RES (6)..(6): (S)-2-amino-3-(N-(carboxymethyl)-2-(perfluorophenyl)acetamido) propanoic acid
  MOD_RES (11)..(11): (S)-3-amino-1-((pent-4-en-1-yloxy)carbonyl)pyrrolidine-3- carboxylic acid
  MOD_RES (12)..(12): (S)-2-amino-3-(thiophen-3-yl)propanoic acid
  MOD_RES (13)..(13): (S)-2-amino-3-(benzo[b]thiophen-3-yl)propanoic acid
  C-term amino
XDXXDXAAFLXXXQ

SEQ ID NO: 1726 - protein, 14 aa, Artificial Sequence
  Description of Artificial Sequence: Synthetic peptide
  N-term Acetic Acid
  MOD_RES (1)..(1): (R)-2-allylpyrrolidine-2-carboxylic acid
  MOD_RES (3)..(3): (S)-2-amino-4,4-dimethylpentanoic acid
  MOD_RES (4)..(4): 2-amino-2-(pent-4-en-1-yl)hept-6-enoic acid
  MOD_RES (6)..(6): (S)-2-amino-3-(N-(carboxymethyl)-2,3,4,5,6-pentafluorobenzamido) propanoic acid
  MOD_RES (11)..(11): (S)-3-amino-1-((pent-4-en-1-yloxy)carbonyl)pyrrolidine-3- carboxylic acid
  MOD_RES (12)..(12): (S)-2-amino-3-(thiophen-3-yl)propanoic acid
  MOD_RES (13)..(13): (S)-2-amino-3-(benzo[b]thiophen-3-yl)propanoic acid
  C-term amino
XDXXDXAAFLXXXQ

SEQ ID NO: 1727 - protein, 14 aa, Artificial Sequence
  Description of Artificial Sequence: Synthetic peptide
  N-term Acetic Acid
  MOD_RES (1)..(1): (R)-2-allylpyrrolidine-2-carboxylic acid
  MOD_RES (3)..(3): (S)-2-amino-4,4-dimethylpentanoic acid
  MOD_RES (4)..(4): 2-amino-2-(pent-4-en-1-yl)hept-6-enoic acid
  MOD_RES (6)..(6): (S)-2-amino-4-(N-(carboxymethyl)-4-(dimethylamino)butanamido) butanoic acid
  MOD_RES (11)..(11): (S)-3-amino-1-((pent-4-en-1-yloxy)carbonyl)pyrrolidine-3- carboxylic acid
  MOD_RES (12)..(12): (S)-2-amino-3-(thiophen-3-yl)propanoic acid
  MOD_RES (13)..(13): (S)-2-amino-3-(benzo[b]thiophen-3-yl)propanoic acid
  C-term amino
XDXXDXAAFLXXXQ

SEQ ID NO: 1728 - protein, 14 aa, Artificial Sequence
  Description of Artificial Sequence: Synthetic peptide
  N-term Acetic Acid
  MOD_RES (1)..(1): (R)-2-allylpyrrolidine-2-carboxylic acid
  MOD_RES (3)..(3): (S)-2-amino-4,4-dimethylpentanoic acid
  MOD_RES (4)..(4): 2-amino-2-(pent-4-en-1-yl)hept-6-enoic acid
  MOD_RES (6)..(6): (S)-2-amino-4-(N-(carboxymethyl)-3-(dimethylamino)propanamido) butanoic acid
  MOD_RES (11)..(11): (S)-3-amino-1-((pent-4-en-1-yloxy)carbonyl)pyrrolidine-3- carboxylic acid
  MOD_RES (12)..(12): (S)-2-amino-3-(thiophen-3-yl)propanoic acid
  MOD_RES (13)..(13): (S)-2-amino-3-(benzo[b]thiophen-3-yl)propanoic acid
  C-term amino
XDXXDXAAFLXXXQ

SEQ ID NO: 1729 - protein, 14 aa, Artificial Sequence
  Description of Artificial Sequence: Synthetic peptide
  N-term Acetic Acid
  MOD_RES (1)..(1): (R)-2-allylpyrrolidine-2-carboxylic acid
  MOD_RES (3)..(3): (S)-2-amino-4,4-dimethylpentanoic acid
  MOD_RES (4)..(4): 2-amino-2-(pent-4-en-1-yl)hept-6-enoic acid
  MOD_RES (6)..(6): (S)-2-amino-4-(N-(carboxymethyl)-1-methylpiperidine-4-carboxamido )butanoic acid
  MOD_RES (11)..(11): (S)-3-amino-1-((pent-4-en-1-yloxy)carbonyl)pyrrolidine-3- carboxylic acid
  MOD_RES (12)..(12): (S)-2-amino-3-(thiophen-3-yl)propanoic acid
  MOD_RES (13)..(13): (S)-2-amino-3-(benzo[b]thiophen-3-yl)propanoic acid
  C-term amino
XDXXDXAAFLXXXQ

SEQ ID NO: 1730 - protein, 14 aa, Artificial Sequence
  Description of Artificial Sequence: Synthetic peptide
  N-term Acetic Acid
  MOD_RES (1)..(1): (R)-2-allylpyrrolidine-2-carboxylic acid
  MOD_RES (3)..(3): (S)-2-amino-4,4-dimethylpentanoic acid
  MOD_RES (4)..(4): 2-amino-2-(pent-4-en-1-yl)hept-6-enoic acid
  MOD_RES (6)..(6): (S)-2-amino-4-(N-(carboxymethyl)-2-(4-(trifluoromethyl)phenyl) acetamido)butanoic acid
  MOD_RES (11)..(11): (S)-3-amino-1-((pent-4-en-1-yloxy)carbonyl)pyrrolidine-3- carboxylic acid
  MOD_RES (12)..(12): (S)-2-amino-3-(thiophen-3-yl)propanoic acid
  MOD_RES (13)..(13): (S)-2-amino-3-(benzo[b]thiophen-3-yl)propanoic acid
  C-term amino
XDXXDXAAFLXXXQ

SEQ ID NO: 1731 - protein, 14 aa, Artificial Sequence
  Description of Artificial Sequence: Synthetic peptide
  N-term Acetic Acid
  MOD_RES (1)..(1): (R)-2-allylpyrrolidine-2-carboxylic acid
  MOD_RES (3)..(3): (S)-2-amino-4,4-dimethylpentanoic acid
  MOD_RES (4)..(4): 2-amino-2-(pent-4-en-1-yl)hept-6-enoic acid
  MOD_RES (6)..(6): (S)-2-amino-4-(N-(carboxymethyl)picolinamido)butanoic acid
  MOD_RES (11)..(11): (S)-3-amino-1-((pent-4-en-1-yloxy)carbonyl)pyrrolidine-3- carboxylic acid
  MOD_RES (12)..(12): (S)-2-amino-3-(thiophen-3-yl)propanoic acid
  MOD_RES (13)..(13): (S)-2-amino-3-(benzo[b]thiophen-3-yl)propanoic acid
  C-term amino
XDXXDXAAFLXXXQ

SEQ ID NO: 1732 - protein, 14 aa, Artificial Sequence
  Description of Artificial Sequence: Synthetic peptide
  N-term Acetic Acid
  MOD_RES (1)..(1): (R)-2-allylpyrrolidine-2-carboxylic acid
  MOD_RES (3)..(3): (S)-2-amino-4,4-dimethylpentanoic acid
  MOD_RES (4)..(4): 2-amino-2-(pent-4-en-1-yl)hept-6-enoic acid
  MOD_RES (6)..(6): (S)-2-amino-4-(N-(carboxymethyl)-4-(morpholinomethyl) benzamido)butanoic acid
  MOD_RES (11)..(11): (S)-3-amino-1-((pent-4-en-1-yloxy)carbonyl)pyrrolidine-3- carboxylic acid
  MOD_RES (12)..(12): (S)-2-amino-3-(thiophen-3-yl)propanoic acid
  MOD_RES (13)..(13): (S)-2-amino-3-(benzo[b]thiophen-3-yl)propanoic acid
  C-term amino
XDXXDXAAFLXXXQ

SEQ ID NO: 1733 - protein, 14 aa, Artificial Sequence
  Description of Artificial Sequence: Synthetic peptide
  N-term Acetic Acid
  MOD_RES (1)..(1): (R)-2-allylpyrrolidine-2-carboxylic acid
  MOD_RES (3)..(3): (S)-2-amino-4,4-dimethylpentanoic acid
  MOD_RES (4)..(4): 2-amino-2-(pent-4-en-1-yl)hept-6-enoic acid
  MOD_RES (6)..(6): (S)-2-amino-4-(N-(carboxymethyl)-2-morpholinoacetamido) butanoic acid
  MOD_RES (11)..(11): (S)-3-amino-1-((pent-4-en-1-yloxy)carbonyl)pyrrolidine-3- carboxylic acid
  MOD_RES (12)..(12): (S)-2-amino-3-(thiophen-3-yl)propanoic acid
  MOD_RES (13)..(13): (S)-2-amino-3-(benzo[b]thiophen-3-yl)propanoic acid
  C-term amino
XDXXDXAAFLXXXQ

SEQ ID NO: 1734 - protein, 14 aa, Artificial Sequence
  Description of Artificial Sequence: Synthetic peptide
  N-term Acetic Acid
  MOD_RES (1)..(1): (R)-2-allylpyrrolidine-2-carboxylic acid
  MOD_RES (3)..(3): (S)-2-amino-4,4-dimethylpentanoic acid
  MOD_RES (4)..(4): 2-amino-2-(pent-4-en-1-yl)hept-6-enoic acid
  MOD_RES (6)..(6): (S)-2-amino-4-(N-(carboxymethyl)-2-(4-methylpiperazin-1-yl) acetamido)butanoic acid
  MOD_RES (11)..(11): (S)-3-amino-1-((pent-4-en-1-yloxy)carbonyl)pyrrolidine-3- carboxylic acid
  MOD_RES (12)..(12): (S)-2-amino-3-(thiophen-3-yl)propanoic acid
  MOD_RES (13)..(13): (S)-2-amino-3-(benzo[b]thiophen-3-yl)propanoic acid
  C-term amino
XDXXDXAAFLXXXQ

SEQ ID NO: 1735 - protein, 14 aa, Artificial Sequence
  Description of Artificial Sequence: Synthetic peptide
  N-term Acetic Acid
  MOD_RES (1)..(1): (R)-2-allylpyrrolidine-2-carboxylic acid
  MOD_RES (3)..(3): (S)-2-amino-4,4-dimethylpentanoic acid
  MOD_RES (4)..(4): 2-amino-2-(pent-4-en-1-yl)hept-6-enoic acid
  MOD_RES (6)..(6): (S)-2-amino-4-(N-(carboxymethyl)-2-(perfluorophenyl) acetamido)butanoic acid
  MOD_RES (11)..(11): (S)-3-amino-1-((pent-4-en-1-yloxy)carbonyl)pyrrolidine-3- carboxylic acid
  MOD_RES (12)..(12): (S)-2-amino-3-(thiophen-3-yl)propanoic acid
  MOD_RES (13)..(13): (S)-2-amino-3-(benzo[b]thiophen-3-yl)propanoic acid
  C-term amino
XDXXDXAAFLXXXQ

SEQ ID NO: 1736 - protein, 14 aa, Artificial Sequence
  Description of Artificial Sequence: Synthetic peptide
  N-term Acetic Acid
  MOD_RES (1)..(1): (R)-2-allylpyrrolidine-2-carboxylic acid
  MOD_RES (3)..(3): (S)-2-amino-4,4-dimethylpentanoic acid
  MOD_RES (4)..(4): 2-amino-2-(pent-4-en-1-yl)hept-6-enoic acid
  MOD_RES (6)..(6): (S)-2-amino-4-(N-(carboxymethyl)-2,3,4,5,6-pentafluorobenzamido )butanoic acid
  MOD_RES (11)..(11): (S)-3-amino-1-((pent-4-en-1-yloxy)carbonyl)pyrrolidine-3- carboxylic acid
  MOD_RES (12)..(12): (S)-2-amino-3-(thiophen-3-yl)propanoic acid
  MOD_RES (13)..(13): (S)-2-amino-3-(benzo[b]thiophen-3-yl)propanoic acid
  C-term amino
XDXXDXAAFLXXXQ

SEQ ID NO: 1737 - protein, 14 aa, Artificial Sequence
  Description of Artificial Sequence: Synthetic peptide
  N-term 2-chloroacetic acid
  MOD_RES (1)..(1): (R)-2-allylpyrrolidine-2-carboxylic acid
  MOD_RES (3)..(3): (S)-2-amino-4,4-dimethylpentanoic acid
  MOD_RES (4)..(4): 2-amino-2-(pent-4-en-1-yl)hept-6-enoic acid
  MOD_RES (6)..(6): (S)-3-(2-amino-2-carboxyethyl)benzoic acid
  MOD_RES (11)..(11): (S)-3-amino-1-((pent-4-en-1-yloxy)carbonyl)pyrrolidine-3- carboxylic acid
  MOD_RES (12)..(12): (S)-2-amino-3-(2-chlorophenyl)propanoic acid
  MOD_RES (13)..(13): (S)-2-amino-3-(benzo[b]thiophen-3-yl)propanoic acid
  C-term amino
XDXXDXAAFLXFXA

SEQ ID NO: 1738 - protein, 14 aa, Artificial Sequence
  Description of Artificial Sequence: Synthetic peptide
  N-term Acetic Acid
  MOD_RES (1)..(1): (R)-2-allylpyrrolidine-2-carboxylic acid
  MOD_RES (3)..(3): (S)-2-amino-4,4-dimethylpentanoic acid
  MOD_RES (4)..(4): 2-amino-2-(pent-4-en-1-yl)hept-6-enoic acid
  MOD_RES (6)..(6): (S)-3-(2-amino-2-carboxyethyl)benzoic acid
  MOD_RES (11)..(11): (S)-3-amino-1-((pent-4-en-1-yloxy)carbonyl)pyrrolidine-3- carboxylic acid
  MOD_RES (12)..(12): (S)-3-([1,1'-biphenyl]-3-yl)-2-aminopropanoic acid
  MOD_RES (13)..(13): (S)-2-amino-3-(thiophen-3-yl)propanoic acid
  C-term amino
XDXXDXAAFLXXXQ

SEQ ID NO: 1739 - protein, 14 aa, Artificial Sequence
  Description of Artificial Sequence: Synthetic peptide
  N-term Acetic Acid
  MOD_RES (1)..(1): (R)-2-allylpyrrolidine-2-carboxylic acid
  MOD_RES (3)..(3): (S)-2-amino-4,4-dimethylpentanoic acid
  MOD_RES (4)..(4): 2-amino-2-(pent-4-en-1-yl)hept-6-enoic acid
  MOD_RES (6)..(6): (S)-3-(2-amino-2-carboxyethyl)benzoic acid
  MOD_RES (11)..(11): (S)-3-amino-1-((pent-4-en-1-yloxy)carbonyl)pyrrolidine-3- carboxylic acid
  MOD_RES (12)..(12): (S)-3-([1,1'-biphenyl]-3-yl)-2-aminopropanoic acid
  MOD_RES (13)..(13): (S)-2-amino-3-cyclobutylpropanoic acid
  C-term amino
XDXXDXAAFLXXXQ

SEQ ID NO: 1740 - protein, 14 aa, Artificial Sequence
  Description of Artificial Sequence: Synthetic peptide
  N-term Acetic Acid
  MOD_RES (1)..(1): (R)-2-allylpyrrolidine-2-carboxylic acid
  MOD_RES (3)..(3): (S)-2-amino-4,4-dimethylpentanoic acid
  MOD_RES (4)..(4): 2-amino-2-(pent-4-en-1-yl)hept-6-enoic acid
  MOD_RES (6)..(6): (S)-3-(2-amino-2-carboxyethyl)benzoic acid
  MOD_RES (11)..(11): (S)-3-amino-1-((pent-4-en-1-yloxy)carbonyl)pyrrolidine-3- carboxylic acid
  MOD_RES (12)..(12): (S)-3-([1,1'-biphenyl]-3-yl)-2-aminopropanoic acid
  MOD_RES (13)..(13): (S)-2-amino-3-(2-(trifluoromethyl)phenyl)propanoic acid
  C-term amino
XDXXDXAAFLXXFQ

SEQ ID NO: 1741 - protein, 14 aa, Artificial Sequence
  Description of Artificial Sequence: Synthetic peptide
  N-term Acetic Acid
  MOD_RES (1)..(1): (R)-2-allylpyrrolidine-2-carboxylic acid
  MOD_RES (3)..(3): (S)-2-amino-4,4-dimethylpentanoic acid
  MOD_RES (4)..(4): 2-amino-2-(pent-4-en-1-yl)hept-6-enoic acid
  MOD_RES (6)..(6): (S)-3-(2-amino-2-carboxyethyl)benzoic acid
  MOD_RES (11)..(11): (S)-3-amino-1-((pent-4-en-1-yloxy)carbonyl)pyrrolidine-3- carboxylic acid
  MOD_RES (12)..(12): (S)-2-amino-3-(thiophen-3-yl)propanoic acid
  MOD_RES (13)..(13): (S)-2-amino-3-(benzo[b]thiophen-3-yl)propanoic acid
  C-term amino
XDXXDXAAFLXXXA

SEQ ID NO: 1742 - protein, 14 aa, Artificial Sequence
  Description of Artificial Sequence: Synthetic peptide
  N-term Acetic Acid
  MOD_RES (1)..(1): (R)-2-allylpyrrolidine-2-carboxylic acid
  MOD_RES (2)..(2): (2S,3R)-2-amino-3-hydroxysuccinic acid
  MOD_RES (3)..(3): (S)-2-amino-4,4-dimethylpentanoic acid
  MOD_RES (4)..(4): 2-amino-2-(pent-4-en-1-yl)hept-6-enoic acid
  MOD_RES (6)..(6): (S)-3-(2-amino-2-carboxyethyl)benzoic acid
  MOD_RES (11)..(11): (S)-3-amino-1-((pent-4-en-1-yloxy)carbonyl)pyrrolidine-3- carboxylic acid
  MOD_RES (12)..(12): (S)-2-amino-3-(thiophen-3-yl)propanoic acid
  MOD_RES (13)..(13): (S)-2-amino-3-(benzo[b]thiophen-3-yl)propanoic acid
  C-term amino
XXXXDXAAFLXXXA

SEQ ID NO: 1743 - protein, 14 aa, Artificial Sequence
  Description of Artificial Sequence: Synthetic peptide
  N-term Acetic Acid
  MOD_RES (1)..(1): (R)-2-allylpyrrolidine-2-carboxylic acid
  MOD_RES (3)..(3): (S)-2-amino-4,4-dimethylpentanoic acid
  MOD_RES (4)..(4): 2-amino-2-(pent-4-en-1-yl)hept-6-enoic acid
  MOD_RES (6)..(6): (S)-3-(2-amino-2-carboxyethyl)benzoic acid
  MOD_RES (11)..(11): (S)-3-amino-1-((pent-4-en-1-yloxy)carbonyl)pyrrolidine-3- carboxylic acid
  MOD_RES (12)..(12): (S)-2-amino-3-(thiophen-3-yl)propanoic acid
  MOD_RES (13)..(13): (S)-2-amino-3-(benzo[b]thiophen-3-yl)propanoic acid
  C-term amino
XDXXDXAAFFXXXA

SEQ ID NO: 1744 - protein, 14 aa, Artificial Sequence
  Description of Artificial Sequence: Synthetic peptide
  N-term Acetic Acid
  MOD_RES (1)..(1): (R)-2-allylpyrrolidine-2-carboxylic acid
  MOD_RES (3)..(3): (S)-2-amino-4,4-dimethylpentanoic acid
  MOD_RES (4)..(4): 2-amino-2-(pent-4-en-1-yl)hept-6-enoic acid
  MOD_RES (6)..(6): (S)-3-(2-amino-2-carboxyethyl)benzoic acid
  MOD_RES (9)..(9): (S)-2-amino-3-(3-fluorophenyl)propanoic acid
  MOD_RES (11)..(11): (S)-3-amino-1-((pent-4-en-1-yloxy)carbonyl)pyrrolidine-3- carboxylic acid
  MOD_RES (12)..(12): (S)-2-amino-3-(thiophen-3-yl)propanoic acid
  MOD_RES (13)..(13): (S)-2-amino-3-(benzo[b]thiophen-3-yl)propanoic acid
  C-term amino
XDXXDXAAFLXXXA

SEQ ID NO: 1745 - protein, 14 aa, Artificial Sequence
  Description of Artificial Sequence: Synthetic peptide
  N-term Acetic Acid
  MOD_RES (1)..(1): (R)-2-allylpyrrolidine-2-carboxylic acid
  MOD_RES (3)..(3): (S)-2-amino-4,4-dimethylpentanoic acid
  MOD_RES (4)..(4): 2-amino-2-(pent-4-en-1-yl)hept-6-enoic acid
  MOD_RES (6)..(6): (S)-3-(2-amino-2-carboxyethyl)benzoic acid
  MOD_RES (11)..(11): (S)-3-amino-1-((pent-4-en-1-yloxy)carbonyl)pyrrolidine-3- carboxylic acid
  MOD_RES (12)..(12): (S)-2-amino-3-(3-fluorophenyl)propanoic acid
  MOD_RES (13)..(13): (S)-2-amino-3-(benzo[b]thiophen-3-yl)propanoic acid
  C-term amino
XDXXDXAAFLXFXA

SEQ ID NO: 1746 - protein, 14 aa, Artificial Sequence
  Description of Artificial Sequence: Synthetic peptide
  N-term Acetic Acid
  MOD_RES (1)..(1): (R)-2-allylpyrrolidine-2-carboxylic acid
  MOD_RES (3)..(3): (S)-2-amino-4,4-dimethylpentanoic acid
  MOD_RES (4)..(4): 2-amino-2-(pent-4-en-1-yl)hept-6-enoic acid
  MOD_RES (6)..(6): (S)-3-(2-amino-2-carboxyethyl)benzoic acid
  MOD_RES (9)..(9): (S)-2-amino-3-(4-fluorophenyl)propanoic acid
  MOD_RES (11)..(11): (S)-3-amino-1-((pent-4-en-1-yloxy)carbonyl)pyrrolidine-3- carboxylic acid
  MOD_RES (12)..(12): (S)-2-amino-3-(thiophen-3-yl)propanoic acid
  MOD_RES (13)..(13): (S)-2-amino-3-(benzo[b]thiophen-3-yl)propanoic acid
  C-term amino
XDXXDXAAFLXXXA

SEQ ID NO: 1747 - protein, 14 aa, Artificial Sequence
  Description of Artificial Sequence: Synthetic peptide
  N-term Acetic Acid
  MOD_RES (1)..(1): (R)-2-allylpyrrolidine-2-carboxylic acid
  MOD_RES (3)..(3): (S)-2-amino-4,4-dimethylpentanoic acid
  MOD_RES (4)..(4): 2-amino-2-(pent-4-en-1-yl)hept-6-enoic acid
  MOD_RES (6)..(6): (S)-3-(2-amino-2-carboxyethyl)benzoic acid
  MOD_RES (11)..(11): (S)-3-amino-1-((pent-4-en-1-yloxy)carbonyl)pyrrolidine-3- carboxylic acid
  MOD_RES (12)..(12): (S)-2-amino-3-(4-fluorophenyl)propanoic acid
  MOD_RES (13)..(13): (S)-2-amino-3-(benzo[b]thiophen-3-yl)propanoic acid
  C-term amino
XDXXDXAAFLXFXA

SEQ ID NO: 1748 - protein, 14 aa, Artificial Sequence
  Description of Artificial Sequence: Synthetic peptide
  N-term Acetic Acid
  MOD_RES (1)..(1): (2R,4S)-4-(pent-4-enoyloxy)pyrrolidine-2-carboxylic acid
  MOD_RES (3)..(3): (S)-2-amino-4,4-dimethylpentanoic acid
  MOD_RES (4)..(4): 2-amino-2-(pent-4-en-1-yl)hept-6-enoic acid
  MOD_RES (6)..(6): (S)-2-amino-3-((carboxymethyl)(2,2,2-trifluoroethyl)amino) propanoic acid
  MOD_RES (11)..(11): (S)-3-amino-1-((pent-4-en-1-yloxy)carbonyl)pyrrolidine-3- carboxylic acid
  MOD_RES (12)..(12): (S)-2-amino-3-(thiophen-3-yl)propanoic acid
  MOD_RES (13)..(13): (S)-2-amino-3-(benzo[b]thiophen-3-yl)propanoic acid
  C-term amino
XDXXDXAAFLXXXQ

SEQ ID NO: 1749 - protein, 14 aa, Artificial Sequence
  Description of Artificial Sequence: Synthetic peptide
  MOD_RES (1)..(1): (allylsulfonyl)-D-proline
  MOD_RES (3)..(3): (S)-2-amino-4,4-dimethylpentanoic acid
  MOD_RES (4)..(4): 2-amino-2-(pent-4-en-1-yl)hept-6-enoic acid
  MOD_RES (6)..(6): (S)-2-amino-3-((carboxymethyl)(2,2,2-trifluoroethyl)amino) propanoic acid
  MOD_RES (11)..(11): (S)-3-amino-1-((pent-4-en-1-yloxy)carbonyl)pyrrolidine-3- carboxylic acid
  MOD_RES (12)..(12): (S)-2-amino-3-(thiophen-3-yl)propanoic acid
  MOD_RES (13)..(13): (S)-2-amino-3-(benzo[b]thiophen-3-yl)propanoic acid
  C-term amino
PDXXDXAAFLXXXQ

SEQ ID NO: 1750 - protein, 19 aa, Artificial Sequence
  Description of Artificial Sequence: Synthetic peptide
  N-term Acetic Acid
  MOD_RES (1)..(1): (R)-2-allylpyrrolidine-2-carboxylic acid
  MOD_RES (3)..(3): (S)-2-amino-4,4-dimethylpentanoic acid
  MOD_RES (4)..(4): 2-amino-2-(pent-4-en-1-yl)hept-6-enoic acid
  MOD_RES (6)..(6): (S)-3-(2-amino-2-carboxyethyl)benzoic acid
  MOD_RES (11)..(11): (S)-3-amino-1-((pent-4-en-1-yloxy)carbonyl)pyrrolidine-3- carboxylic acid
  MOD_RES (12)..(12): (S)-2-amino-3-(thiophen-3-yl)propanoic acid
  MOD_RES (13)..(13): (S)-2-amino-3-(benzo[b]thiophen-3-yl)propanoic acid
  C-term amino
XDXXDXAAFLXXXNAAAAA

SEQ ID NO: 1751 - protein, 21 aa, Artificial Sequence
  Description of Artificial Sequence: Synthetic peptide
  N-term Acetic Acid
  MOD_RES (1)..(1): (R)-2-allylpyrrolidine-2-carboxylic acid
  MOD_RES (3)..(3): (S)-2-amino-4,4-dimethylpentanoic acid
  MOD_RES (4)..(4): 2-amino-2-(pent-4-en-1-yl)hept-6-enoic acid
  MOD_RES (6)..(6): (S)-3-(2-amino-2-carboxyethyl)benzoic acid
  MOD_RES (11)..(11): (S)-3-amino-1-((pent-4-en-1-yloxy)carbonyl)pyrrolidine-3- carboxylic acid
  MOD_RES (12)..(12): (S)-2-amino-3-(thiophen-3-yl)propanoic acid
  MOD_RES (13)..(13): (S)-2-amino-3-(benzo[b]thiophen-3-yl)propanoic acid
  C-term amino
XDXXDXAAFLXXXNAAAAAAA

SEQ ID NO: 1752 - protein, 23 aa, Artificial Sequence
  Description of Artificial Sequence: Synthetic peptide
  N-term Acetic Acid
  MOD_RES (1)..(1): (R)-2-allylpyrrolidine-2-carboxylic acid
  MOD_RES (3)..(3): (S)-2-amino-4,4-dimethylpentanoic acid
  MOD_RES (4)..(4): 2-amino-2-(pent-4-en-1-yl)hept-6-enoic acid
  MOD_RES (6)..(6): (S)-3-(2-amino-2-carboxyethyl)benzoic acid
  MOD_RES (11)..(11): (S)-3-amino-1-((pent-4-en-1-yloxy)carbonyl)pyrrolidine-3- carboxylic acid
  MOD_RES (12)..(12): (S)-2-amino-3-(thiophen-3-yl)propanoic acid
  MOD_RES (13)..(13): (S)-2-amino-3-(benzo[b]thiophen-3-yl)propanoic acid
  C-term amino
XDXXDXAAFLXXXNAAAAAAAAA

SEQ ID NO: 1753 - protein, 17 aa, Artificial Sequence
  Description of Artificial Sequence: Synthetic peptide
  N-term Acetic Acid
  MOD_RES (1)..(1): (R)-2-allylpyrrolidine-2-carboxylic acid
  MOD_RES (3)..(3): (S)-2-amino-4,4-dimethylpentanoic acid
  MOD_RES (4)..(4): 2-amino-2-(pent-4-en-1-yl)hept-6-enoic acid
  MOD_RES (6)..(6): (S)-3-(2-amino-2-carboxyethyl)benzoic acid
  MOD_RES (11)..(11): (S)-3-amino-1-((pent-4-en-1-yloxy)carbonyl)pyrrolidine-3- carboxylic acid
  MOD_RES (12)..(12): (S)-2-amino-3-(thiophen-3-yl)propanoic acid
  MOD_RES (13)..(13): (S)-2-amino-3-(benzo[b]thiophen-3-yl)propanoic acid
  MOD_RES (16)..(16): 2-amino-2-methylpropanoic acid
  C-term amino
XDXXDXAAFLXXXNAXA

SEQ ID NO: 1754 - protein, 19 aa, Artificial Sequence
  Description of Artificial Sequence: Synthetic peptide
  N-term Acetic Acid
  MOD_RES (1)..(1): (R)-2-allylpyrrolidine-2-carboxylic acid
  MOD_RES (3)..(3): (S)-2-amino-4,4-dimethylpentanoic acid
  MOD_RES (4)..(4): 2-amino-2-(pent-4-en-1-yl)hept-6-enoic acid
  MOD_RES (6)..(6): (S)-3-(2-amino-2-carboxyethyl)benzoic acid
  MOD_RES (11)..(11): (S)-3-amino-1-((pent-4-en-1-yloxy)carbonyl)pyrrolidine-3- carboxylic acid
  MOD_RES (12)..(12): (S)-2-amino-3-(thiophen-3-yl)propanoic acid
  MOD_RES (13)..(13): (S)-2-amino-3-(benzo[b]thiophen-3-yl)propanoic acid
  MOD_RES (16)..(16): 2-amino-2-methylpropanoic acid
  MOD_RES (18)..(18): 2-amino-2-methylpropanoic acid
  C-term amino
XDXXDXAAFLXXXNAXAXA

SEQ ID NO: 1755 - protein, 21 aa, Artificial Sequence
  Description of Artificial Sequence: Synthetic peptide
  N-term Acetic Acid
  MOD_RES (1)..(1): (R)-2-allylpyrrolidine-2-carboxylic acid
  MOD_RES (3)..(3): (S)-2-amino-4,4-dimethylpentanoic acid
  MOD_RES (4)..(4): 2-amino-2-(pent-4-en-1-yl)hept-6-enoic acid
  MOD_RES (6)..(6): (S)-3-(2-amino-2-carboxyethyl)benzoic acid
  MOD_RES (11)..(11): (S)-3-amino-1-((pent-4-en-1-yloxy)carbonyl)pyrrolidine-3- carboxylic acid
  MOD_RES (12)..(12): (S)-2-amino-3-(thiophen-3-yl)propanoic acid
  MOD_RES (13)..(13): (S)-2-amino-3-(benzo[b]thiophen-3-yl)propanoic acid
  MOD_RES (16)..(16): 2-amino-2-methylpropanoic acid
  MOD_RES (18)..(18): 2-amino-2-methylpropanoic acid
  MOD_RES (20)..(20): 2-amino-2-methylpropanoic acid
  C-term amino
XDXXDXAAFLXXXNAXAXAXA

SEQ ID NO: 1756 - protein, 15 aa, Artificial Sequence
  Description of Artificial Sequence: Synthetic peptide
  N-term Acetic Acid
  MOD_RES (1)..(1): (R)-2-allylpyrrolidine-2-carboxylic acid
  MOD_RES (3)..(3): (S)-2-amino-4,4-dimethylpentanoic acid
  MOD_RES (4)..(4): 2-amino-2-(pent-4-en-1-yl)hept-6-enoic acid
  MOD_RES (6)..(6): (S)-3-(2-amino-2-carboxyethyl)benzoic acid
  MOD_RES (11)..(11): (S)-3-amino-1-((pent-4-en-1-yloxy)carbonyl)pyrrolidine-3- carboxylic acid
  MOD_RES (12)..(12): (S)-2-amino-3-(thiophen-3-yl)propanoic acid
  MOD_RES (13)..(13): (S)-2-amino-3-(benzo[b]thiophen-3-yl)propanoic acid
  C-term amino
XDXXDXAAFLXXXNL

SEQ ID NO: 1757 - protein, 17 aa, Artificial Sequence
  Description of Artificial Sequence: Synthetic peptide
  N-term Acetic Acid
  MOD_RES (1)..(1): (R)-2-allylpyrrolidine-2-carboxylic acid
  MOD_RES (3)..(3): (S)-2-amino-4,4-dimethylpentanoic acid
  MOD_RES (4)..(4): 2-amino-2-(pent-4-en-1-yl)hept-6-enoic acid
  MOD_RES (6)..(6): (S)-3-(2-amino-2-carboxyethyl)benzoic acid
  MOD_RES (11)..(11): (S)-3-amino-1-((pent-4-en-1-yloxy)carbonyl)pyrrolidine-3- carboxylic acid
  MOD_RES (12)..(12): (S)-2-amino-3-(thiophen-3-yl)propanoic acid
  MOD_RES (13)..(13): (S)-2-amino-3-(benzo[b]thiophen-3-yl)propanoic acid
  C-term amino
XDXXDXAAFLXXXNLLL

SEQ ID NO: 1758 - protein, 17 aa, Artificial Sequence
  Description of Artificial Sequence: Synthetic peptide
  N-term Acetic Acid
  MOD_RES (1)..(1): (R)-2-allylpyrrolidine-2-carboxylic acid
  MOD_RES (3)..(3): (S)-2-amino-4,4-dimethylpentanoic acid
  MOD_RES (4)..(4): 2-amino-2-(pent-4-en-1-yl)hept-6-enoic acid
  MOD_RES (6)..(6): (S)-3-(2-amino-2-carboxyethyl)benzoic acid
  MOD_RES (11)..(11): (S)-3-amino-1-((pent-4-en-1-yloxy)carbonyl)pyrrolidine-3- carboxylic acid
  MOD_RES (12)..(12): (S)-2-amino-3-(thiophen-3-yl)propanoic acid
  MOD_RES (13)..(13): (S)-2-amino-3-(benzo[b]thiophen-3-yl)propanoic acid
  C-term amino
XDXXDXAAFLXXXNALL

SEQ ID NO: 1759 - protein, 19 aa, Artificial Sequence
  Description of Artificial Sequence: Synthetic peptide
  N-term Acetic Acid
  MOD_RES (1)..(1): (R)-2-allylpyrrolidine-2-carboxylic acid
  MOD_RES (3)..(3): (S)-2-amino-4,4-dimethylpentanoic acid
  MOD_RES (4)..(4): 2-amino-2-(pent-4-en-1-yl)hept-6-enoic acid
  MOD_RES (6)..(6): (S)-3-(2-amino-2-carboxyethyl)benzoic acid
  MOD_RES (11)..(11): (S)-3-amino-1-((pent-4-en-1-yloxy)carbonyl)pyrrolidine-3- carboxylic acid
  MOD_RES (12)..(12): (S)-2-amino-3-(thiophen-3-yl)propanoic acid
  MOD_RES (13)..(13): (S)-2-amino-3-(benzo[b]thiophen-3-yl)propanoic acid
  C-term amino
XDXXDXAAFLXXXNLLLLL

SEQ ID NO: 1760 - protein, 19 aa, Artificial Sequence
  Description of Artificial Sequence: Synthetic peptide
  N-term Acetic Acid
  MOD_RES (1)..(1): (R)-2-allylpyrrolidine-2-carboxylic acid
  MOD_RES (3)..(3): (S)-2-amino-4,4-dimethylpentanoic acid
  MOD_RES (4)..(4): 2-amino-2-(pent-4-en-1-yl)hept-6-enoic acid
  MOD_RES (6)..(6): (S)-3-(2-amino-2-carboxyethyl)benzoic acid
  MOD_RES (11)..(11): (S)-3-amino-1-((pent-4-en-1-yloxy)carbonyl)pyrrolidine-3- carboxylic acid
  MOD_RES (12)..(12): (S)-2-amino-3-(thiophen-3-yl)propanoic acid
  MOD_RES (13)..(13): (S)-2-amino-3-(benzo[b]thiophen-3-yl)propanoic acid
  C-term amino
XDXXDXAAFLXXXNALALA

SEQ ID NO: 1761 - protein, 21 aa, Artificial Sequence
  Description of Artificial Sequence: Synthetic peptide
  N-term Acetic Acid
  MOD_RES (1)..(1): (R)-2-allylpyrrolidine-2-carboxylic acid
  MOD_RES (3)..(3): (S)-2-amino-4,4-dimethylpentanoic acid
  MOD_RES (4)..(4): 2-amino-2-(pent-4-en-1-yl)hept-6-enoic acid
  MOD_RES (6)..(6): (S)-3-(2-amino-2-carboxyethyl)benzoic acid
  MOD_RES (11)..(11): (S)-3-amino-1-((pent-4-en-1-yloxy)carbonyl)pyrrolidine-3- carboxylic acid
  MOD_RES (12)..(12): (S)-2-amino-3-(thiophen-3-yl)propanoic acid
  MOD_RES (13)..(13): (S)-2-amino-3-(benzo[b]thiophen-3-yl)propanoic acid
  C-term amino
XDXXDXAAFLXXXNALALALA

SEQ ID NO: 1762 - protein, 14 aa, Artificial Sequence
  Description of Artificial Sequence: Synthetic peptide
  N-term 2-bromoacetic acid
  MOD_RES (1)..(1): (R)-2-allylpyrrolidine-2-carboxylic acid
  MOD_RES (3)..(3): (S)-2-amino-4,4-dimethylpentanoic acid
  MOD_RES (4)..(4): 2-amino-2-(pent-4-en-1-yl)hept-6-enoic acid
  MOD_RES (11)..(11): (S)-3-amino-1-((pent-4-en-1-yloxy)carbonyl)pyrrolidine-3- carboxylic acid
  MOD_RES (12)..(12): (S)-2-amino-3-(thiophen-3-yl)propanoic acid
  MOD_RES (13)..(13): (S)-2-amino-3-(benzo[b]thiophen-3-yl)propanoic acid
  C-term amino
XDXXDDAAFQXXXH

SEQ ID NO: 1763 - protein, 14 aa, Artificial Sequence
  Description of Artificial Sequence: Synthetic peptide
  N-term 2-bromoacetic acid
  MOD_RES (1)..(1): (R)-2-allylpyrrolidine-2-carboxylic acid
  MOD_RES (3)..(3): (S)-2-amino-4,4-dimethylpentanoic acid
  MOD_RES (4)..(4): 2-amino-2-(pent-4-en-1-yl)hept-6-enoic acid
  MOD_RES (6)..(6): (S)-3-(2-amino-2-carboxyethyl)benzoic acid
  MOD_RES (11)..(11): (S)-3-amino-1-((pent-4-en-1-yloxy)carbonyl)pyrrolidine-3- carboxylic acid
  MOD_RES (12)..(12): (S)-2-amino-3-(2-chlorophenyl)propanoic acid
  MOD_RES (13)..(13): (S)-2-amino-3-(benzo[b]thiophen-3-yl)propanoic acid
  C-term amino
XDXXDXAAFLXFXA

SEQ ID NO: 1764 - protein, 14 aa, Artificial Sequence
  Description of Artificial Sequence: Synthetic peptide
  N-term Acetic Acid
  MOD_RES (1)..(1): (R)-2-allylpyrrolidine-2-carboxylic acid
  MOD_RES (3)..(3): (S)-2-amino-4,4-dimethylpentanoic acid
  MOD_RES (4)..(4): 2-amino-2-(pent-4-en-1-yl)hept-6-enoic acid
  MOD_RES (6)..(6): (S)-3-(2-amino-2-carboxyethyl)benzoic acid
  MOD_RES (11)..(11): (S)-3-amino-1-((pent-4-en-1-yloxy)carbonyl)pyrrolidine-3- carboxylic acid
  MOD_RES (12)..(12): (S)-2-amino-3-(thiophen-3-yl)propanoic acid
  MOD_RES (13)..(13): (S)-2-amino-3-(3-bromo-4-fluorophenyl)propanoic acid
  C-term amino
XDXXDXAAFLXXFQ

SEQ ID NO: 1765 - protein, 14 aa, Artificial Sequence
  Description of Artificial Sequence: Synthetic peptide
  N-term Acetic Acid
  MOD_RES (1)..(1): (R)-2-allylpyrrolidine-2-carboxylic acid
  MOD_RES (3)..(3): (S)-2-amino-4,4-dimethylpentanoic acid
  MOD_RES (4)..(4): 2-amino-2-(pent-4-en-1-yl)hept-6-enoic acid
  MOD_RES (6)..(6): (S)-3-(2-amino-2-carboxyethyl)benzoic acid
  MOD_RES (11)..(11): (S)-3-amino-1-((pent-4-en-1-yloxy)carbonyl)pyrrolidine-3- carboxylic acid
  MOD_RES (12)..(12): (S)-2-amino-3-(thiophen-3-yl)propanoic acid
  MOD_RES (13)..(13): (S)-2-amino-3-(3-bromo-4-fluorophenyl)propanoic acid
  C-term amino
XDXXDXQAFVXXFA

SEQ ID NO: 1766 - protein, 14 aa, Artificial Sequence
  Description of Artificial Sequence: Synthetic peptide
  N-term Acetic Acid
  MOD_RES (1)..(1): (R)-2-allylpyrrolidine-2-carboxylic acid
  MOD_RES (3)..(3): (S)-2-amino-4,4-dimethylpentanoic acid
  MOD_RES (4)..(4): 2-amino-2-(pent-4-en-1-yl)hept-6-enoic acid
  MOD_RES (6)..(6): (S)-3-(2-amino-2-carboxyethyl)benzoic acid
  MOD_RES (11)..(11): (S)-3-amino-1-((pent-4-en-1-yloxy)carbonyl)pyrrolidine-3- carboxylic acid
  MOD_RES (12)..(12): (S)-2-amino-3-(2-(trifluoromethyl)phenyl)propanoic acid
  MOD_RES (13)..(13): (S)-2-amino-3-(3-bromo-4-fluorophenyl)propanoic acid
  C-term amino
XDXXDXAAFLXFFS

SEQ ID NO: 1767 - protein, 14 aa, Artificial Sequence
  Description of Artificial Sequence: Synthetic peptide
  N-term Acetic Acid
  MOD_RES (1)..(1): (R)-2-allylpyrrolidine-2-carboxylic acid
  MOD_RES (3)..(3): (S)-2-amino-4,4-dimethylpentanoic acid
  MOD_RES (4)..(4): 2-amino-2-(pent-4-en-1-yl)hept-6-enoic acid
  MOD_RES (6)..(6): (S)-3-(2-amino-2-carboxyethyl)benzoic acid
  MOD_RES (11)..(11): (S)-3-amino-1-((pent-4-en-1-yloxy)carbonyl)pyrrolidine-3- carboxylic acid
  MOD_RES (12)..(12): (S)-2-amino-3-(2-(trifluoromethyl)phenyl)propanoic acid
  MOD_RES (13)..(13): (S)-2-amino-3-(3-bromo-4-fluorophenyl)propanoic acid
  C-term amino
XDXXDXQAFLXFFA

SEQ ID NO: 1768 - protein, 14 aa, Artificial Sequence
  Description of Artificial Sequence: Synthetic peptide
  N-term Acetic Acid
  MOD_RES (1)..(1): (R)-2-allylpyrrolidine-2-carboxylic acid
  MOD_RES (3)..(3): (S)-2-amino-4,4-dimethylpentanoic acid
  MOD_RES (4)..(4): 2-amino-2-(pent-4-en-1-yl)hept-6-enoic acid
  MOD_RES (6)..(6): (S)-3-(2-amino-2-carboxyethyl)benzoic acid
  MOD_RES (11)..(11): (S)-3-amino-1-((pent-4-en-1-yloxy)carbonyl)pyrrolidine-3- carboxylic acid
  MOD_RES (12)..(12): (S)-2-amino-3-(thiophen-3-yl)propanoic acid
  MOD_RES (13)..(13): (S)-2-amino-3-(3,4-dimethylphenyl)propanoic acid
  C-term amino
XDXXDXAAFLXXFQ

SEQ ID NO: 1769 - protein, 14 aa, Artificial Sequence
  Description of Artificial Sequence: Synthetic peptide
  N-term Acetic Acid
  MOD_RES (1)..(1): (R)-2-allylpyrrolidine-2-carboxylic acid
  MOD_RES (3)..(3): (S)-2-amino-4,4-dimethylpentanoic acid
  MOD_RES (4)..(4): 2-amino-2-(pent-4-en-1-yl)hept-6-enoic acid
  MOD_RES (6)..(6): (S)-3-(2-amino-2-carboxyethyl)benzoic acid
  MOD_RES (11)..(11): (S)-3-amino-1-((pent-4-en-1-yloxy)carbonyl)pyrrolidine-3- carboxylic acid
  MOD_RES (12)..(12): (S)-2-amino-3-(thiophen-3-yl)propanoic acid
  MOD_RES (13)..(13): (S)-2-amino-3-(3,4-dimethylphenyl)propanoic acid
  C-term amino
XDXXDXQAFVXXFA

SEQ ID NO: 1770 - protein, 14 aa, Artificial Sequence
  Description of Artificial Sequence: Synthetic peptide
  N-term Acetic Acid
  MOD_RES (1)..(1): (R)-2-allylpyrrolidine-2-carboxylic acid
  MOD_RES (3)..(3): (S)-2-amino-4,4-dimethylpentanoic acid
  MOD_RES (4)..(4): 2-amino-2-(pent-4-en-1-yl)hept-6-enoic acid
  MOD_RES (6)..(6): (S)-3-(2-amino-2-carboxyethyl)benzoic acid
  MOD_RES (11)..(11): (S)-3-amino-1-((pent-4-en-1-yloxy)carbonyl)pyrrolidine-3- carboxylic acid
  MOD_RES (12)..(12): (S)-2-amino-3-(2-(trifluoromethyl)phenyl)propanoic acid
  MOD_RES (13)..(13): (S)-2-amino-3-(3,4-dimethylphenyl)propanoic acid
  C-term amino
XDXXDXAAFLXFFS

SEQ ID NO: 1771 - protein, 14 aa, Artificial Sequence
  Description of Artificial Sequence: Synthetic peptide
  N-term Acetic Acid
  MOD_RES (1)..(1): (R)-2-allylpyrrolidine-2-carboxylic acid
  MOD_RES (3)..(3): (S)-2-amino-4,4-dimethylpentanoic acid
  MOD_RES (4)..(4): 2-amino-2-(pent-4-en-1-yl)hept-6-enoic acid
  MOD_RES (6)..(6): (S)-3-(2-amino-2-carboxyethyl)benzoic acid
  MOD_RES (11)..(11): (S)-3-amino-1-((pent-4-en-1-yloxy)carbonyl)pyrrolidine-3- carboxylic acid
  MOD_RES (12)..(12): (S)-2-amino-3-(2-(trifluoromethyl)phenyl)propanoic acid
  MOD_RES (13)..(13): (S)-2-amino-3-(3,4-dimethylphenyl)propanoic acid
  C-term amino
XDXXDXQAFLXFFA

SEQ ID NO: 1772 - protein, 14 aa, Artificial Sequence
  Description of Artificial Sequence: Synthetic peptide
  N-term Acetic Acid
  MOD_RES (1)..(1): (R)-2-allylpyrrolidine-2-carboxylic acid
  MOD_RES (3)..(3): (S)-2-amino-4,4-dimethylpentanoic acid
  MOD_RES (4)..(4): 2-amino-2-(pent-4-en-1-yl)hept-6-enoic acid
  MOD_RES (6)..(6): (S)-3-(2-amino-2-carboxyethyl)benzoic acid
  MOD_RES (11)..(11): (S)-3-amino-1-((pent-4-en-1-yloxy)carbonyl)pyrrolidine-3- carboxylic acid
  MOD_RES (12)..(12): (S)-2-amino-3-(thiophen-3-yl)propanoic acid
  MOD_RES (13)..(13): (S)-2-amino-3-(2,3-dihydro-1H-inden-5-yl)propanoic acid
  C-term amino
XDXXDXAAFLXXXQ

SEQ ID NO: 1773 - protein, 14 aa, Artificial Sequence
  Description of Artificial Sequence: Synthetic peptide
  N-term Acetic Acid
  MOD_RES (1)..(1): (R)-2-allylpyrrolidine-2-carboxylic acid
  MOD_RES (3)..(3): (S)-2-amino-4,4-dimethylpentanoic acid
  MOD_RES (4)..(4): 2-amino-2-(pent-4-en-1-yl)hept-6-enoic acid
  MOD_RES (6)..(6): (S)-3-(2-amino-2-carboxyethyl)benzoic acid
  MOD_RES (11)..(11): (S)-3-amino-1-((pent-4-en-1-yloxy)carbonyl)pyrrolidine-3- carboxylic acid
  MOD_RES (12)..(12): (S)-2-amino-3-(thiophen-3-yl)propanoic acid
  MOD_RES (13)..(13): (S)-2-amino-3-(2,3-dihydro-1H-inden-5-yl)propanoic acid
  C-term amino
XDXXDXQAFVXXXA

SEQ ID NO: 1774 - protein, 14 aa, Artificial Sequence
  Description of Artificial Sequence: Synthetic peptide
  N-term Acetic Acid
  MOD_RES (1)..(1): (R)-2-allylpyrrolidine-2-carboxylic acid
  MOD_RES (3)..(3): (S)-2-amino-4,4-dimethylpentanoic acid
  MOD_RES (4)..(4): 2-amino-2-(pent-4-en-1-yl)hept-6-enoic acid
  MOD_RES (6)..(6): (S)-3-(2-amino-2-carboxyethyl)benzoic acid
  MOD_RES (11)..(11): (S)-3-amino-1-((pent-4-en-1-yloxy)carbonyl)pyrrolidine-3- carboxylic acid
  MOD_RES (12)..(12): (S)-2-amino-3-(2-(trifluoromethyl)phenyl)propanoic acid
  MOD_RES (13)..(13): (S)-2-amino-3-(2,3-dihydro-1H-inden-5-yl)propanoic acid
  C-term amino
XDXXDXAAFLXFXS

SEQ ID NO: 1775 - protein, 14 aa, Artificial Sequence
  Description of Artificial Sequence: Synthetic peptide
  N-term Acetic Acid
  MOD_RES (1)..(1): (R)-2-allylpyrrolidine-2-carboxylic acid
  MOD_RES (3)..(3): (S)-2-amino-4,4-dimethylpentanoic acid
  MOD_RES (4)..(4): 2-amino-2-(pent-4-en-1-yl)hept-6-enoic acid
  MOD_RES (6)..(6): (S)-3-(2-amino-2-carboxyethyl)benzoic acid
  MOD_RES (11)..(11): (S)-3-amino-1-((pent-4-en-1-yloxy)carbonyl)pyrrolidine-3- carboxylic acid
  MOD_RES (12)..(12): (S)-2-amino-3-(2-(trifluoromethyl)phenyl)propanoic acid
  MOD_RES (13)..(13): (S)-2-amino-3-(2,3-dihydro-1H-inden-5-yl)propanoic acid
  C-term amino
XDXXDXQAFLXFXA

SEQ ID NO: 1776 - protein, 14 aa, Artificial Sequence
  Description of Artificial Sequence: Synthetic peptide
  N-term Acetic Acid
  MOD_RES (1)..(1): (R)-2-allylpyrrolidine-2-carboxylic acid
  MOD_RES (3)..(3): (S)-2-amino-4,4-dimethylpentanoic acid
  MOD_RES (4)..(4): 2-amino-2-(pent-4-en-1-yl)hept-6-enoic acid
  MOD_RES (6)..(6): (S)-3-(2-amino-2-carboxyethyl)benzoic acid
  MOD_RES (7)..(7): N5-ethyl-L-glutamine
  MOD_RES (11)..(11): (S)-3-amino-1-((pent-4-en-1-yloxy)carbonyl)pyrrolidine-3- carboxylic acid
  MOD_RES (12)..(12): (S)-2-amino-3-(2-(trifluoromethyl)phenyl)propanoic acid
  MOD_RES (13)..(13): (S)-2-amino-3-(benzo[b]thiophen-3-yl)propanoic acid
  MOD_RES (14)..(14): N5-ethyl-L-glutamine
  C-term amino
XDXXDXQAFLXFXQ

SEQ ID NO: 1777 - protein, 14 aa, Artificial Sequence
  Description of Artificial Sequence: Synthetic peptide
  N-term Acetic Acid
  MOD_RES (1)..(1): (R)-2-allylpyrrolidine-2-carboxylic acid
  MOD_RES (3)..(3): (S)-2-amino-4,4-dimethylpentanoic acid
  MOD_RES (4)..(4): 2-amino-2-(pent-4-en-1-yl)hept-6-enoic acid
  MOD_RES (6)..(6): (S)-3-(2-amino-2-carboxyethyl)benzoic acid
  MOD_RES (7)..(7): N5,N5-dimethyl-L-glutamine
  MOD_RES (11)..(11): (S)-3-amino-1-((pent-4-en-1-yloxy)carbonyl)pyrrolidine-3- carboxylic acid
  MOD_RES (12)..(12): (S)-2-amino-3-(2-(trifluoromethyl)phenyl)propanoic acid
  MOD_RES (13)..(13): (S)-2-amino-3-(benzo[b]thiophen-3-yl)propanoic acid
  MOD_RES (14)..(14): N5,N5-dimethyl-L-glutamine
  C-term amino
XDXXDXQAFLXFXQ

SEQ ID NO: 1778 - protein, 14 aa, Artificial Sequence
  Description of Artificial Sequence: Synthetic peptide
  N-term Acetic Acid
  MOD_RES (1)..(1): (R)-2-allylpyrrolidine-2-carboxylic acid
  MOD_RES (3)..(3): (S)-2-amino-4,4-dimethylpentanoic acid
  MOD_RES (4)..(4): 2-amino-2-(pent-4-en-1-yl)hept-6-enoic acid
  MOD_RES (6)..(6): (S)-3-(2-amino-2-carboxyethyl)benzoic acid
  MOD_RES (7)..(7): N5-methyl-N5-(4-(methylamino)butyl)-L-glutamine
  MOD_RES (11)..(11): (S)-3-amino-1-((pent-4-en-1-yloxy)carbonyl)pyrrolidine-3- carboxylic acid
  MOD_RES (12)..(12): (S)-2-amino-3-(thiophen-3-yl)propanoic acid
  MOD_RES (13)..(13): (S)-2-amino-3-(benzo[b]thiophen-3-yl)propanoic acid
  C-term amino
XDXXDXQAFVXXXA

SEQ ID NO: 1779 - protein, 14 aa, Artificial Sequence
  Description of Artificial Sequence: Synthetic peptide
  N-term Acetic Acid
  MOD_RES (1)..(1): (R)-2-allylpyrrolidine-2-carboxylic acid
  MOD_RES (3)..(3): (S)-2-amino-4,4-dimethylpentanoic acid
  MOD_RES (4)..(4): 2-amino-2-(pent-4-en-1-yl)hept-6-enoic acid
  MOD_RES (6)..(6): (S)-3-(2-amino-2-carboxyethyl)benzoic acid
  MOD_RES (7)..(7): N5-ethyl-L-glutamine
  MOD_RES (11)..(11): (S)-3-amino-1-((pent-4-en-1-yloxy)carbonyl)pyrrolidine-3- carboxylic acid
  MOD_RES (12)..(12): (S)-2-amino-3-(thiophen-3-yl)propanoic acid
  MOD_RES (13)..(13): (S)-2-amino-3-(benzo[b]thiophen-3-yl)propanoic acid
  C-term amino
XDXXDXQAFVXXXA

SEQ ID NO: 1780 - protein, 14 aa, Artificial Sequence
  Description of Artificial Sequence: Synthetic peptide
  N-term Acetic Acid
  MOD_RES (1)..(1): (R)-2-allylpyrrolidine-2-carboxylic acid
  MOD_RES (3)..(3): (S)-2-amino-4,4-dimethylpentanoic acid
  MOD_RES (4)..(4): 2-amino-2-(pent-4-en-1-yl)hept-6-enoic acid
  MOD_RES (6)..(6): (S)-3-(2-amino-2-carboxyethyl)benzoic acid
  MOD_RES (7)..(7): N5,N5-dimethyl-L-glutamine
  MOD_RES (11)..(11): (S)-3-amino-1-((pent-4-en-1-yloxy)carbonyl)pyrrolidine-3- carboxylic acid
  MOD_RES (12)..(12): (S)-2-amino-3-(thiophen-3-yl)propanoic acid
  MOD_RES (13)..(13): (S)-2-amino-3-(benzo[b]thiophen-3-yl)propanoic acid
  C-term amino
XDXXDXQAFVXXXA

SEQ ID NO: 1781 - protein, 14 aa, Artificial Sequence
  Description of Artificial Sequence: Synthetic peptide
  N-term butyl hydrogen carbonate
  MOD_RES (1)..(1): (R)-2-allylpyrrolidine-2-carboxylic acid
  MOD_RES (3)..(3): (S)-2-amino-4,4-dimethylpentanoic acid
  MOD_RES (4)..(4): 2-amino-2-(pent-4-en-1-yl)hept-6-enoic acid
  MOD_RES (6)..(6): (S)-3-(2-amino-2-carboxyethyl)benzoic acid
  MOD_RES (11)..(11): (S)-3-amino-1-((pent-4-en-1-yloxy)carbonyl)pyrrolidine-3- carboxylic acid
  MOD_RES (12)..(12): (S)-2-amino-3-(2-chlorophenyl)propanoic acid
  MOD_RES (13)..(13): (S)-2-amino-3-(benzo[b]thiophen-3-yl)propanoic acid
  C-term amino
XDXXDXAAFLXFXA

SEQ ID NO: 1782 - protein, 14 aa, Artificial Sequence
  Description of Artificial Sequence: Synthetic peptide
  N-term isobutyl hydrogen carbonate
  MOD_RES (1)..(1): (R)-2-allylpyrrolidine-2-carboxylic acid
  MOD_RES (3)..(3): (S)-2-amino-4,4-dimethylpentanoic acid
  MOD_RES (4)..(4): 2-amino-2-(pent-4-en-1-yl)hept-6-enoic acid
  MOD_RES (6)..(6): (S)-3-(2-amino-2-carboxyethyl)benzoic acid
  MOD_RES (11)..(11): (S)-3-amino-1-((pent-4-en-1-yloxy)carbonyl)pyrrolidine-3- carboxylic acid
  MOD_RES (12)..(12): (S)-2-amino-3-(2-chlorophenyl)propanoic acid
  MOD_RES (13)..(13): (S)-2-amino-3-(benzo[b]thiophen-3-yl)propanoic acid
  C-term amino
XDXXDXAAFLXFXA

SEQ ID NO: 1783 - protein, 14 aa, Artificial Sequence
  Description of Artificial Sequence: Synthetic peptide
  MOD_RES (1)..(1): 3-(allyloxy)benzoic acid
  MOD_RES (3)..(3): (S)-2-amino-4,4-dimethylpentanoic acid
  MOD_RES (4)..(4): 2-amino-2-(pent-4-en-1-yl)hept-6-enoic acid
  MOD_RES (11)..(11): (S)-3-amino-1-((pent-4-en-1-yloxy)carbonyl)pyrrolidine-3- carboxylic acid
  MOD_RES (12)..(12): (S)-2-amino-3-(thiophen-3-yl)propanoic acid
  MOD_RES (13)..(13): (S)-2-amino-3-(benzo[b]thiophen-3-yl)propanoic acid
  C-term amino
XDXXDDAAFNXXXQ

SEQ ID NO: 1784 - protein, 14 aa, Artificial Sequence
  Description of Artificial Sequence: Synthetic peptide
  N-term Acetic Acid
  MOD_RES (1)..(1): (R)-2-allylpyrrolidine-2-carboxylic acid
  MOD_RES (3)..(3): (S)-2-amino-4,4-dimethylpentanoic acid
  MOD_RES (4)..(4): 2-amino-2-(pent-4-en-1-yl)hept-6-enoic acid
  MOD_RES (6)..(6): (S)-3-(2-amino-2-carboxyethyl)benzoic acid
  MOD_RES (11)..(11): (S)-3-amino-1-((pent-4-en-1-yloxy)carbonyl)pyrrolidine-3- carboxylic acid
  MOD_RES (12)..(12): (S)-2-amino-3-(thiophen-3-yl)propanoic acid
  MOD_RES (13)..(13): (S)-2-amino-3-(3-bromophenyl)propanoic acid
  C-term amino
XDXXDXAAFLXXFQ

SEQ ID NO: 1785 - protein, 14 aa, Artificial Sequence
  Description of Artificial Sequence: Synthetic peptide
  N-term Acetic Acid
  MOD_RES (1)..(1): (R)-2-allylpyrrolidine-2-carboxylic acid
  MOD_RES (3)..(3): (S)-2-amino-4,4-dimethylpentanoic acid
  MOD_RES (4)..(4): 2-amino-2-(pent-4-en-1-yl)hept-6-enoic acid
  MOD_RES (6)..(6): (S)-3-(2-amino-2-carboxyethyl)benzoic acid
  MOD_RES (11)..(11): (S)-3-amino-1-((pent-4-en-1-yloxy)carbonyl)pyrrolidine-3- carboxylic acid
  MOD_RES (12)..(12): (S)-2-amino-3-(thiophen-3-yl)propanoic acid
  MOD_RES (13)..(13): (S)-2-amino-3-(3-bromophenyl)propanoic acid
  C-term amino
XDXXDXQAFVXXFA

SEQ ID NO: 1786 - protein, 14 aa, Artificial Sequence
  Description of Artificial Sequence: Synthetic peptide
  N-term Acetic Acid
  MOD_RES (1)..(1): (R)-2-allylpyrrolidine-2-carboxylic acid
  MOD_RES (3)..(3): (S)-2-amino-4,4-dimethylpentanoic acid
  MOD_RES (4)..(4): 2-amino-2-(pent-4-en-1-yl)hept-6-enoic acid
  MOD_RES (6)..(6): (S)-3-(2-amino-2-carboxyethyl)benzoic acid
  MOD_RES (11)..(11): (S)-3-amino-1-((pent-4-en-1-yloxy)carbonyl)pyrrolidine-3- carboxylic acid
  MOD_RES (12)..(12): (S)-2-amino-3-(thiophen-3-yl)propanoic acid
  MOD_RES (13)..(13): (S)-2-amino-3-(naphthalen-2-yl)propanoic acid
  C-term amino
XDXXDXAAFLXXXQ

SEQ ID NO: 1787 - protein, 14 aa, Artificial Sequence
  Description of Artificial Sequence: Synthetic peptide
  N-term Acetic Acid
  MOD_RES (1)..(1): (R)-2-allylpyrrolidine-2-carboxylic acid
  MOD_RES (3)..(3): (S)-2-amino-4,4-dimethylpentanoic acid
  MOD_RES (4)..(4): 2-amino-2-(pent-4-en-1-yl)hept-6-enoic acid
  MOD_RES (6)..(6): (S)-3-(2-amino-2-carboxyethyl)benzoic acid
  MOD_RES (11)..(11): (S)-3-amino-1-((pent-4-en-1-yloxy)carbonyl)pyrrolidine-3- carboxylic acid
  MOD_RES (12)..(12): (S)-2-amino-3-(thiophen-3-yl)propanoic acid
  MOD_RES (13)..(13): (S)-2-amino-3-(naphthalen-2-yl)propanoic acid
  C-term amino
XDXXDXQAFVXXXA

SEQ ID NO: 1788 - protein, 14 aa, Artificial Sequence
  Description of Artificial Sequence: Synthetic peptide
  N-term Acetic Acid
  MOD_RES (1)..(1): (R)-2-allylpyrrolidine-2-carboxylic acid
  MOD_RES (3)..(3): (S)-2-amino-4,4-dimethylpentanoic acid
  MOD_RES (4)..(4): 2-amino-2-(pent-4-en-1-yl)hept-6-enoic acid
  MOD_RES (6)..(6): (S)-3-(2-amino-2-carboxyethyl)benzoic acid
  MOD_RES (11)..(11): (S)-3-amino-1-((pent-4-en-1-yloxy)carbonyl)pyrrolidine-3- carboxylic acid
  MOD_RES (12)..(12): (S)-2-amino-3-(thiophen-3-yl)propanoic acid
  MOD_RES (13)..(13): (2S,3R)-2-amino-3-(naphthalen-2-yl)butanoic acid
  C-term amino
XDXXDXAAFLXXXQ

SEQ ID NO: 1789 - protein, 14 aa, Artificial Sequence
  Description of Artificial Sequence: Synthetic peptide
  N-term Acetic Acid
  MOD_RES (1)..(1): (R)-2-allylpyrrolidine-2-carboxylic acid
  MOD_RES (3)..(3): (S)-2-amino-4,4-dimethylpentanoic acid
  MOD_RES (4)..(4): 2-amino-2-(pent-4-en-1-yl)hept-6-enoic acid
  MOD_RES (6)..(6): (S)-3-(2-amino-2-carboxyethyl)benzoic acid
  MOD_RES (11)..(11): (S)-3-amino-1-((pent-4-en-1-yloxy)carbonyl)pyrrolidine-3- carboxylic acid
  MOD_RES (12)..(12): (S)-2-amino-3-(thiophen-3-yl)propanoic acid
  MOD_RES (13)..(13): (2S,3R)-2-amino-3-(naphthalen-2-yl)butanoic acid
  C-term amino
XDXXDXQAFVXXXA

SEQ ID NO: 1790 - protein, 14 aa, Artificial Sequence
  Description of Artificial Sequence: Synthetic peptide
  N-term Acetic Acid
  MOD_RES (1)..(1): (R)-2-allylpyrrolidine-2-carboxylic acid
  MOD_RES (3)..(3): (S)-2-amino-4,4-dimethylpentanoic acid
  MOD_RES (4)..(4): 2-amino-2-(pent-4-en-1-yl)hept-6-enoic acid
  MOD_RES (6)..(6): (S)-3-(2-amino-2-carboxyethyl)benzoic acid
  MOD_RES (11)..(11): (S)-3-amino-1-((pent-4-en-1-yloxy)carbonyl)pyrrolidine-3- carboxylic acid
  MOD_RES (12)..(12): (S)-2-amino-3-(thiophen-3-yl)propanoic acid
  MOD_RES (13)..(13): (2S,3S)-2-amino-3-(naphthalen-2-yl)butanoic acid
  C-term amino
XDXXDXAAFLXXXQ

SEQ ID NO: 1791 - protein, 14 aa, Artificial Sequence
  Description of Artificial Sequence: Synthetic peptide
  N-term Acetic Acid
  MOD_RES (1)..(1): (R)-2-allylpyrrolidine-2-carboxylic acid
  MOD_RES (3)..(3): (S)-2-amino-4,4-dimethylpentanoic acid
  MOD_RES (4)..(4): 2-amino-2-(pent-4-en-1-yl)hept-6-enoic acid
  MOD_RES (6)..(6): (S)-3-(2-amino-2-carboxyethyl)benzoic acid
  MOD_RES (11)..(11): (S)-3-amino-1-((pent-4-en-1-yloxy)carbonyl)pyrrolidine-3- carboxylic acid
  MOD_RES (12)..(12): (S)-2-amino-3-(thiophen-3-yl)propanoic acid
  MOD_RES (13)..(13): (2S,3S)-2-amino-3-(naphthalen-2-yl)butanoic acid
  C-term amino
XDXXDXQAFVXXXA

SEQ ID NO: 1792 - protein, 14 aa, Artificial Sequence
  Description of Artificial Sequence: Synthetic peptide
  N-term Acetic Acid
  MOD_RES (1)..(1): (R)-2-allylpyrrolidine-2-carboxylic acid
  MOD_RES (3)..(3): (S)-2-amino-4,4-dimethylpentanoic acid
  MOD_RES (4)..(4): 2-amino-2-(pent-4-en-1-yl)hept-6-enoic acid
  MOD_RES (6)..(6): (S)-3-(2-amino-2-carboxyethyl)benzoic acid
  MOD_RES (7)..(7): (S)-2-amino-5-morpholino-5-oxopentanoic acid
  MOD_RES (11)..(11): (S)-3-amino-1-((pent-4-en-1-yloxy)carbonyl)pyrrolidine-3- carboxylic acid
  MOD_RES (12)..(12): (S)-2-amino-3-(2-(trifluoromethyl)phenyl)propanoic acid
  MOD_RES (13)..(13): (S)-2-amino-3-(benzo[b]thiophen-3-yl)propanoic acid
  C-term amino
XDXXDXXAFLXFXA

SEQ ID NO: 1793 - protein, 14 aa, Artificial Sequence
  Description of Artificial Sequence: Synthetic peptide
  N-term Acetic Acid
  MOD_RES (1)..(1): (R)-2-allylpyrrolidine-2-carboxylic acid
  MOD_RES (3)..(3): (S)-2-amino-4,4-dimethylpentanoic acid
  MOD_RES (4)..(4): 2-amino-2-(pent-4-en-1-yl)hept-6-enoic acid
  MOD_RES (6)..(6): (S)-3-(2-amino-2-carboxyethyl)benzoic acid
  MOD_RES (7)..(7): (S)-2-amino-5-oxo-5-(4-(2,2,2-trifluoroethyl)piperazin-1-yl) pentanoic acid
  MOD_RES (11)..(11): (S)-3-amino-1-((pent-4-en-1-yloxy)carbonyl)pyrrolidine-3- carboxylic acid
  MOD_RES (12)..(12): (S)-2-amino-3-(2-(trifluoromethyl)phenyl)propanoic acid
  MOD_RES (13)..(13): (S)-2-amino-3-(benzo[b]thiophen-3-yl)propanoic acid
  C-term amino
XDXXDXXAFLXFXA

SEQ ID NO: 1794 - protein, 14 aa, Artificial Sequence
  Description of Artificial Sequence: Synthetic peptide
  N-term Acetic Acid
  MOD_RES (1)..(1): (R)-2-allylpyrrolidine-2-carboxylic acid
  MOD_RES (3)..(3): (S)-2-amino-4,4-dimethylpentanoic acid
  MOD_RES (4)..(4): 2-amino-2-(pent-4-en-1-yl)hept-6-enoic acid
  MOD_RES (6)..(6): (S)-3-(2-amino-2-carboxyethyl)benzoic acid
  MOD_RES (7)..(7): (S)-5-([1,4'-bipiperidin]-1'-yl)-2-amino-5-oxopentanoic acid
  MOD_RES (11)..(11): (S)-3-amino-1-((pent-4-en-1-yloxy)carbonyl)pyrrolidine-3- carboxylic acid
  MOD_RES (12)..(12): (S)-2-amino-3-(2-(trifluoromethyl)phenyl)propanoic acid
  MOD_RES (13)..(13): (S)-2-amino-3-(benzo[b]thiophen-3-yl)propanoic acid
  C-term amino
XDXXDXXAFLXFXA

SEQ ID NO: 1795 - protein, 14 aa, Artificial Sequence
  Description of Artificial Sequence: Synthetic peptide
  N-term Acetic Acid
  MOD_RES (1)..(1): (R)-2-allylpyrrolidine-2-carboxylic acid
  MOD_RES (3)..(3): (S)-2-amino-4,4-dimethylpentanoic acid
  MOD_RES (4)..(4): 2-amino-2-(pent-4-en-1-yl)hept-6-enoic acid
  MOD_RES (6)..(6): (S)-3-(2-amino-2-carboxyethyl)benzoic acid
  MOD_RES (7)..(7): (S)-2-amino-5-oxo-5-(3-oxopiperazin-1-yl)pentanoic acid
  MOD_RES (11)..(11): (S)-3-amino-1-((pent-4-en-1-yloxy)carbonyl)pyrrolidine-3- carboxylic acid
  MOD_RES (12)..(12): (S)-2-amino-3-(2-(trifluoromethyl)phenyl)propanoic acid
  MOD_RES (13)..(13): (S)-2-amino-3-(benzo[b]thiophen-3-yl)propanoic acid
  C-term amino
XDXXDXXAFLXFXA

SEQ ID NO: 1796 - protein, 14 aa, Artificial Sequence
  Description of Artificial Sequence: Synthetic peptide
  N-term Acetic Acid
  MOD_RES (1)..(1): (R)-2-allylpyrrolidine-2-carboxylic acid
  MOD_RES (3)..(3): (S)-2-amino-4,4-dimethylpentanoic acid
  MOD_RES (4)..(4): 2-amino-2-(pent-4-en-1-yl)hept-6-enoic acid
  MOD_RES (6)..(6): (S)-3-(2-amino-2-carboxyethyl)benzoic acid
  MOD_RES (7)..(7): (S)-5-(4-acetylpiperazin-1-yl)-2-amino-5-oxopentanoic acid
  MOD_RES (11)..(11): (S)-3-amino-1-((pent-4-en-1-yloxy)carbonyl)pyrrolidine-3- carboxylic acid
  MOD_RES (12)..(12): (S)-2-amino-3-(2-(trifluoromethyl)phenyl)propanoic acid
  MOD_RES (13)..(13): (S)-2-amino-3-(benzo[b]thiophen-3-yl)propanoic acid
  C-term amino
XDXXDXXAFLXFXA

SEQ ID NO: 1797 - protein, 14 aa, Artificial Sequence
  Description of Artificial Sequence: Synthetic peptide
  N-term Acetic Acid
  MOD_RES (1)..(1): (R)-2-allylpyrrolidine-2-carboxylic acid
  MOD_RES (3)..(3): (S)-2-amino-4,4-dimethylpentanoic acid
  MOD_RES (4)..(4): 2-amino-2-(pent-4-en-1-yl)hept-6-enoic acid
  MOD_RES (6)..(6): (S)-3-(2-amino-2-carboxyethyl)benzoic acid
  MOD_RES (7)..(7): (S)-2-amino-5-(isoindolin-2-yl)-5-oxopentanoic acid
  MOD_RES (11)..(11): (S)-3-amino-1-((pent-4-en-1-yloxy)carbonyl)pyrrolidine-3- carboxylic acid
  MOD_RES (12)..(12): (S)-2-amino-3-(2-(trifluoromethyl)phenyl)propanoic acid
  MOD_RES (13)..(13): (S)-2-amino-3-(benzo[b]thiophen-3-yl)propanoic acid
  C-term amino
XDXXDXXAFLXFXA

SEQ ID NO: 1798 - protein, 14 aa, Artificial Sequence
  Description of Artificial Sequence: Synthetic peptide
  N-term Acetic Acid
  MOD_RES (1)..(1): (R)-2-allylpyrrolidine-2-carboxylic acid
  MOD_RES (3)..(3): (S)-2-amino-4,4-dimethylpentanoic acid
  MOD_RES (4)..(4): 2-amino-2-(pent-4-en-1-yl)hept-6-enoic acid
  MOD_RES (6)..(6): (S)-3-(2-amino-2-carboxyethyl)benzoic acid
  MOD_RES (7)..(7): (S)-2-amino-5-(4-(ethylsulfonyl)piperazin-1-yl)-5-oxopentanoic acid
  MOD_RES (11)..(11): (S)-3-amino-1-((pent-4-en-1-yloxy)carbonyl)pyrrolidine-3- carboxylic acid
  MOD_RES (12)..(12): (S)-2-amino-3-(2-(trifluoromethyl)phenyl)propanoic acid
  MOD_RES (13)..(13): (S)-2-amino-3-(benzo[b]thiophen-3-yl)propanoic acid
  C-term amino
XDXXDXXAFLXFXA

SEQ ID NO: 1799 - protein, 14 aa, Artificial Sequence
  Description of Artificial Sequence: Synthetic peptide
  N-term Acetic Acid
  MOD_RES (1)..(1): (R)-2-allylpyrrolidine-2-carboxylic acid
  MOD_RES (3)..(3): (S)-2-amino-4,4-dimethylpentanoic acid
  MOD_RES (4)..(4): 2-amino-2-(pent-4-en-1-yl)hept-6-enoic acid
  MOD_RES (6)..(6): (S)-3-(2-amino-2-carboxyethyl)benzoic acid
  MOD_RES (7)..(7): N5,N5-bis(2-methoxyethyl)-L-glutamine
  MOD_RES (11)..(11): (S)-3-amino-1-((pent-4-en-1-yloxy)carbonyl)pyrrolidine-3- carboxylic acid
  MOD_RES (12)..(12): (S)-2-amino-3-(2-(trifluoromethyl)phenyl)propanoic acid
  MOD_RES (13)..(13): (S)-2-amino-3-(benzo[b]thiophen-3-yl)propanoic acid
  C-term amino
XDXXDXQAFLXFXA

SEQ ID NO: 1800 - protein, 14 aa, Artificial Sequence
  Description of Artificial Sequence: Synthetic peptide
  N-term Acetic Acid
  MOD_RES (1)..(1): (R)-2-allylpyrrolidine-2-carboxylic acid
  MOD_RES (3)..(3): (S)-2-amino-4,4-dimethylpentanoic acid
  MOD_RES (4)..(4): 2-amino-2-(pent-4-en-1-yl)hept-6-enoic acid
  MOD_RES (6)..(6): (S)-3-(2-amino-2-carboxyethyl)benzoic acid
  MOD_RES (7)..(7): (S)-2-amino-5-(4-(3-(dimethylamino)propyl)piperazin-1-yl)-5- oxopentanoic acid
  MOD_RES (11)..(11): (S)-3-amino-1-((pent-4-en-1-yloxy)carbonyl)pyrrolidine-3- carboxylic acid
  MOD_RES (12)..(12): (S)-2-amino-3-(2-(trifluoromethyl)phenyl)propanoic acid
  MOD_RES (13)..(13): (S)-2-amino-3-(benzo[b]thiophen-3-yl)propanoic acid
  C-term amino
XDXXDXXAFLXFXA

SEQ ID NO: 1801 - protein, 14 aa, Artificial Sequence
  Description of Artificial Sequence: Synthetic peptide
  N-term methyl hydrogen carbonate
  MOD_RES (1)..(1): (R)-2-allylpyrrolidine-2-carboxylic acid
  MOD_RES (3)..(3): (S)-2-amino-4,4-dimethylpentanoic acid
  MOD_RES (4)..(4): 2-amino-2-(pent-4-en-1-yl)hept-6-enoic acid
  MOD_RES (6)..(6): (S)-3-(2-amino-2-carboxyethyl)benzoic acid
  MOD_RES (11)..(11): (S)-3-amino-1-((pent-4-en-1-yloxy)carbonyl)pyrrolidine-3- carboxylic acid
  MOD_RES (12)..(12): (S)-2-amino-3-(2-chlorophenyl)propanoic acid
  MOD_RES (13)..(13): (S)-2-amino-3-(benzo[b]thiophen-3-yl)propanoic acid
  C-term amino
XDXXDXAAFLXFXA

SEQ ID NO: 1802 - protein, 14 aa, Artificial Sequence
  Description of Artificial Sequence: Synthetic peptide
  N-term cyclohexyl hydrogen carbonate
  MOD_RES (1)..(1): (R)-2-allylpyrrolidine-2-carboxylic acid
  MOD_RES (3)..(3): (S)-2-amino-4,4-dimethylpentanoic acid
  MOD_RES (4)..(4): 2-amino-2-(pent-4-en-1-yl)hept-6-enoic acid
  MOD_RES (6)..(6): (S)-3-(2-amino-2-carboxyethyl)benzoic acid
  MOD_RES (11)..(11): (S)-3-amino-1-((pent-4-en-1-yloxy)carbonyl)pyrrolidine-3- carboxylic acid
  MOD_RES (12)..(12): (S)-2-amino-3-(2-chlorophenyl)propanoic acid
  MOD_RES (13)..(13): (S)-2-amino-3-(benzo[b]thiophen-3-yl)propanoic acid
  C-term amino
XDXXDXAAFLXFXA

SEQ ID NO: 1803 - protein, 14 aa, Artificial Sequence
  Description of Artificial Sequence: Synthetic peptide
  N-term phenyl hydrogen carbonate
  MOD_RES (1)..(1): (R)-2-allylpyrrolidine-2-carboxylic acid
  MOD_RES (3)..(3): (S)-2-amino-4,4-dimethylpentanoic acid
  MOD_RES (4)..(4): 2-amino-2-(pent-4-en-1-yl)hept-6-enoic acid
  MOD_RES (11)..(11): (S)-3-amino-1-((pent-4-en-1-yloxy)carbonyl)pyrrolidine-3- carboxylic acid
  MOD_RES (12)..(12): (S)-2-amino-3-(thiophen-3-yl)propanoic acid
  MOD_RES (13)..(13): (S)-2-amino-3-(benzo[b]thiophen-3-yl)propanoic acid
  C-term amino
XDXXDDAAFQXXXH

SEQ ID NO: 1804 - protein, 14 aa, Artificial Sequence
  Description of Artificial Sequence: Synthetic peptide
  N-term phenyl hydrogen carbonate
  MOD_RES (1)..(1): (R)-2-allylpyrrolidine-2-carboxylic acid
  MOD_RES (3)..(3): (S)-2-amino-4,4-dimethylpentanoic acid
  MOD_RES (4)..(4): 2-amino-2-(pent-4-en-1-yl)hept-6-enoic acid
  MOD_RES (6)..(6): (S)-3-(2-amino-2-carboxyethyl)benzoic acid
  MOD_RES (11)..(11): (S)-3-amino-1-((pent-4-en-1-yloxy)carbonyl)pyrrolidine-3- carboxylic acid
  MOD_RES (12)..(12): (S)-2-amino-3-(2-chlorophenyl)propanoic acid
  MOD_RES (13)..(13): (S)-2-amino-3-(benzo[b]thiophen-3-yl)propanoic acid
  C-term amino
XDXXDXAAFLXFXA

SEQ ID NO: 1805 - protein, 14 aa, Artificial Sequence
  Description of Artificial Sequence: Synthetic peptide
  N-term Acetic Acid
  MOD_RES (1)..(1): (2R,4S)-4-((3-(allyloxy)benzoyl)oxy)pyrrolidine-2-carboxylic acid
  MOD_RES (3)..(3): (S)-2-amino-4,4-dimethylpentanoic acid
  MOD_RES (4)..(4): 2-amino-2-(pent-4-en-1-yl)hept-6-enoic acid
  MOD_RES (6)..(6): (S)-2-amino-3-((carboxymethyl)(2,2,2-trifluoroethyl)amino) propanoic acid
  MOD_RES (11)..(11): (S)-3-amino-1-((pent-4-en-1-yloxy)carbonyl)pyrrolidine-3- carboxylic acid
  MOD_RES (12)..(12): (S)-2-amino-3-(thiophen-3-yl)propanoic acid
  MOD_RES (13)..(13): (S)-2-amino-3-(benzo[b]thiophen-3-yl)propanoic acid
  C-term amino
XDXXDXAAFLXXXQ

SEQ ID NO: 1806 - protein, 14 aa, Artificial Sequence
  Description of Artificial Sequence: Synthetic peptide
  N-term Acetic Acid
  MOD_RES (1)..(1): (R)-2-allylpyrrolidine-2-carboxylic acid
  MOD_RES (2)..(2): (S)-3-(1-(2-amino-2-carboxyethyl)-1H-1,2,3-triazol-4-yl)-2,2- dimethylpropanoic acid
  MOD_RES (3)..(3): (S)-2-amino-4,4-dimethylpentanoic acid
  MOD_RES (4)..(4): 2-amino-2-(pent-4-en-1-yl)hept-6-enoic acid
  MOD_RES (11)..(11): (S)-3-amino-1-((pent-4-en-1-yloxy)carbonyl)pyrrolidine-3- carboxylic acid
  MOD_RES (12)..(12): (S)-2-amino-3-(thiophen-3-yl)propanoic acid
  MOD_RES (13)..(13): (S)-2-amino-3-(benzo[b]thiophen-3-yl)propanoic acid
  C-term amino
XXXXDDAAFNXXXQ

SEQ ID NO: 1807 - protein, 14 aa, Artificial Sequence
  Description of Artificial Sequence: Synthetic peptide
  N-term Acetic Acid
  MOD_RES (1)..(1): (R)-2-allylpyrrolidine-2-carboxylic acid
  MOD_RES (2)..(2): (S)-2-amino-3-(4-(2-carboxypropan-2-yl)-1H-1,2,3-triazol-1-yl) propanoic acid
  MOD_RES (3)..(3): (S)-2-amino-4,4-dimethylpentanoic acid
  MOD_RES (4)..(4): 2-amino-2-(pent-4-en-1-yl)hept-6-enoic acid
  MOD_RES (11)..(11): (S)-3-amino-1-((pent-4-en-1-yloxy)carbonyl)pyrrolidine-3- carboxylic acid
  MOD_RES (12)..(12): (S)-2-amino-3-(thiophen-3-yl)propanoic acid
  MOD_RES (13)..(13): (S)-2-amino-3-(benzo[b]thiophen-3-yl)propanoic acid
  C-term amino
XXXXDDAAFNXXXQ

SEQ ID NO: 1808 - protein, 14 aa, Artificial Sequence
  Description of Artificial Sequence: Synthetic peptide
  N-term Acetic Acid
  MOD_RES (1)..(1): (R)-2-allylpyrrolidine-2-carboxylic acid
  MOD_RES (3)..(3): (S)-2-amino-4,4-dimethylpentanoic acid
  MOD_RES (4)..(4): 2-amino-2-(pent-4-en-1-yl)hept-6-enoic acid
  MOD_RES (11)..(11): (S)-3-amino-1-((pent-4-en-1-yloxy)carbonyl)pyrrolidine-3- carboxylic acid
  MOD_RES (12)..(12): (S)-2-amino-3-(thiophen-3-yl)propanoic acid
  MOD_RES (13)..(13): (S)-2-amino-3-(benzo[b]thiophen-3-yl)propanoic acid
  C-term amino
XEXXNTAAFNXXXQ

SEQ ID NO: 1809 - protein, 14 aa, Artificial Sequence
  Description of Artificial Sequence: Synthetic peptide
  N-term Acetic Acid
  MOD_RES (1)..(1): (R)-2-allylpyrrolidine-2-carboxylic acid
  MOD_RES (3)..(3): (S)-2-amino-4,4-dimethylpentanoic acid
  MOD_RES (4)..(4): 2-amino-2-(pent-4-en-1-yl)hept-6-enoic acid
  MOD_RES (11)..(11): (S)-3-amino-1-((pent-4-en-1-yloxy)carbonyl)pyrrolidine-3- carboxylic acid
  MOD_RES (12)..(12): (S)-2-amino-3-(thiophen-3-yl)propanoic acid
  MOD_RES (13)..(13): (S)-2-amino-3-(benzo[b]thiophen-3-yl)propanoic acid
  C-term amino
XNXXNTAAFNXXXQ

SEQ ID NO: 1810 - protein, 14 aa, Artificial Sequence
  Description of Artificial Sequence: Synthetic peptide
  N-term Acetic Acid
  MOD_RES (1)..(1): (R)-2-allylpyrrolidine-2-carboxylic acid
  MOD_RES (3)..(3): (S)-2-amino-4,4-dimethylpentanoic acid
  MOD_RES (4)..(4): 2-amino-2-(pent-4-en-1-yl)hept-6-enoic acid
  MOD_RES (11)..(11): (S)-3-amino-1-((pent-4-en-1-yloxy)carbonyl)pyrrolidine-3- carboxylic acid
  MOD_RES (12)..(12): (S)-2-amino-3-(thiophen-3-yl)propanoic acid
  MOD_RES (13)..(13): (S)-2-amino-3-(benzo[b]thiophen-3-yl)propanoic acid
  C-term amino
XDXXNTAAFTXXXA

SEQ ID NO: 1811 - protein, 14 aa, Artificial Sequence
  Description of Artificial Sequence: Synthetic peptide
  N-term Acetic Acid
  MOD_RES (1)..(1): (R)-2-allylpyrrolidine-2-carboxylic acid
  MOD_RES (3)..(3): (S)-2-amino-4,4-dimethylpentanoic acid
  MOD_RES (4)..(4): 2-amino-2-(pent-4-en-1-yl)hept-6-enoic acid
  MOD_RES (6)..(6): (S)-3-(2-amino-2-carboxyethyl)benzoic acid
  MOD_RES (11)..(11): (S)-3-amino-1-((pent-4-en-1-yloxy)carbonyl)pyrrolidine-3- carboxylic acid
  MOD_RES (12)..(12): (S)-2-amino-3-(thiophen-3-yl)propanoic acid
  MOD_RES (13)..(13): (S)-2-amino-3-(benzo[b]thiophen-3-yl)propanoic acid
  C-term amino
XDXXNXAAFNXXXQ

SEQ ID NO: 1812 - protein, 14 aa, Artificial Sequence
  Description of Artificial Sequence: Synthetic peptide
  N-term Acetic Acid
  MOD_RES (1)..(1): (R)-2-allylpyrrolidine-2-carboxylic acid
  MOD_RES (3)..(3): (S)-2-amino-4,4-dimethylpentanoic acid
  MOD_RES (4)..(4): 2-amino-2-(pent-4-en-1-yl)hept-6-enoic acid
  MOD_RES (6)..(6): (S)-3-(2-amino-2-carboxyethyl)benzoic acid
  MOD_RES (11)..(11): (S)-3-amino-1-((pent-4-en-1-yloxy)carbonyl)pyrrolidine-3- carboxylic acid
  MOD_RES (12)..(12): (S)-2-amino-3-(thiophen-3-yl)propanoic acid
  MOD_RES (13)..(13): (S)-2-amino-3-(benzo[b]thiophen-3-yl)propanoic acid
  C-term amino
XDXXNXAAFTXXXQ

SEQ ID NO: 1813 - protein, 14 aa, Artificial Sequence
  Description of Artificial Sequence: Synthetic peptide
  N-term Acetic Acid
  MOD_RES (1)..(1): (R)-2-allylpyrrolidine-2-carboxylic acid
  MOD_RES (3)..(3): (S)-2-amino-4,4-dimethylpentanoic acid
  MOD_RES (4)..(4): 2-amino-2-(pent-4-en-1-yl)hept-6-enoic acid
  MOD_RES (11)..(11): (S)-3-amino-1-((pent-4-en-1-yloxy)carbonyl)pyrrolidine-3- carboxylic acid
  MOD_RES (12)..(12): (S)-2-amino-3-(thiophen-3-yl)propanoic acid
  MOD_RES (13)..(13): (S)-2-amino-3-(benzo[b]thiophen-3-yl)propanoic acid
  C-term amino
XDXXNTAAFTXXXH

SEQ ID NO: 1814 - protein, 14 aa, Artificial Sequence
  Description of Artificial Sequence: Synthetic peptide
  N-term Acetic Acid
  MOD_RES (1)..(1): (R)-2-allylpyrrolidine-2-carboxylic acid
  MOD_RES (3)..(3): (S)-2-amino-4,4-dimethylpentanoic acid
  MOD_RES (4)..(4): 2-amino-2-(pent-4-en-1-yl)hept-6-enoic acid
  MOD_RES (7)..(7): 2-amino-2-methylpropanoic acid
  MOD_RES (11)..(11): (S)-3-amino-1-((pent-4-en-1-yloxy)carbonyl)pyrrolidine-3- carboxylic acid
  MOD_RES (12)..(12): (S)-2-amino-3-(thiophen-3-yl)propanoic acid
  MOD_RES (13)..(13): (S)-2-amino-3-(benzo[b]thiophen-3-yl)propanoic acid
  C-term amino
XDXXNTXAFNXXXQ

SEQ ID NO: 1815 - protein, 14 aa, Artificial Sequence
  Description of Artificial Sequence: Synthetic peptide
  N-term Acetic Acid
  MOD_RES (1)..(1): (R)-2-allylpyrrolidine-2-carboxylic acid
  MOD_RES (3)..(3): (S)-2-amino-4,4-dimethylpentanoic acid
  MOD_RES (4)..(4): 2-amino-2-(pent-4-en-1-yl)hept-6-enoic acid
  MOD_RES (8)..(8): 2-amino-2-methylpropanoic acid
  MOD_RES (11)..(11): (S)-3-amino-1-((pent-4-en-1-yloxy)carbonyl)pyrrolidine-3- carboxylic acid
  MOD_RES (12)..(12): (S)-2-amino-3-(thiophen-3-yl)propanoic acid
  MOD_RES (13)..(13): (S)-2-amino-3-(benzo[b]thiophen-3-yl)propanoic acid
  C-term amino
XDXXNTAXFNXXXQ

SEQ ID NO: 1816 - protein, 14 aa, Artificial Sequence
  Description of Artificial Sequence: Synthetic peptide
  N-term Acetic Acid
  MOD_RES (1)..(1): (R)-2-allylpyrrolidine-2-carboxylic acid
  MOD_RES (3)..(3): (S)-2-amino-3-cyclohexylpropanoic acid
  MOD_RES (4)..(4): 2-amino-2-(pent-4-en-1-yl)hept-6-enoic acid
  MOD_RES (6)..(6): (S)-3-(2-amino-2-carboxyethyl)benzoic acid
  MOD_RES (7)..(7): N6-isopropyl-L-lysine
  MOD_RES (11)..(11): (S)-3-amino-1-((pent-4-en-1-yloxy)carbonyl)pyrrolidine-3- carboxylic acid
  MOD_RES (13)..(13): (S)-2-amino-3-(benzo[b]thiophen-3-yl)propanoic acid
  C-term amino
XNXXDXKAFLXFXQ

SEQ ID NO: 1817 - protein, 14 aa, Artificial Sequence
  Description of Artificial Sequence: Synthetic peptide
  N-term Acetic Acid
  MOD_RES (1)..(1): (R)-2-allylpyrrolidine-2-carboxylic acid
  MOD_RES (3)..(3): (S)-2-amino-3-cyclohexylpropanoic acid
  MOD_RES (4)..(4): 2-amino-2-(pent-4-en-1-yl)hept-6-enoic acid
  MOD_RES (6)..(6): (S)-2-amino-3-((carboxymethyl)(2,2,2-trifluoroethyl)amino) propanoic acid
  MOD_RES (7)..(7): N6-isopropyl-L-lysine
  MOD_RES (11)..(11): (S)-3-amino-1-((pent-4-en-1-yloxy)carbonyl)pyrrolidine-3- carboxylic acid
  MOD_RES (13)..(13): (S)-2-amino-3-(benzo[b]thiophen-3-yl)propanoic acid
  C-term amino
XNXXDXKAFLXFXQ

SEQ ID NO: 1818 - protein, 14 aa, Artificial Sequence
  Description of Artificial Sequence: Synthetic peptide
  N-term Acetic Acid
  MOD_RES (1)..(1): (R)-2-allylpyrrolidine-2-carboxylic acid
  MOD_RES (3)..(3): (S)-2-amino-3-cyclohexylpropanoic acid
  MOD_RES (4)..(4): 2-amino-2-(pent-4-en-1-yl)hept-6-enoic acid
  MOD_RES (6)..(6): (S)-2-amino-3-(3-carbamoylphenyl)propanoic acid
  MOD_RES (7)..(7): N6-isopropyl-L-lysine
  MOD_RES (11)..(11): (S)-3-amino-1-((pent-4-en-1-yloxy)carbonyl)pyrrolidine-3- carboxylic acid
  MOD_RES (13)..(13): (S)-2-amino-3-(benzo[b]thiophen-3-yl)propanoic acid
  C-term amino
XNXXDFKAFLXFXQ

SEQ ID NO: 1819 - protein, 14 aa, Artificial Sequence
  Description of Artificial Sequence: Synthetic peptide
  N-term Acetic Acid
  MOD_RES (1)..(1): (R)-2-allylpyrrolidine-2-carboxylic acid
  MOD_RES (3)..(3): (S)-2-amino-3-cyclohexylpropanoic acid
  MOD_RES (4)..(4): 2-amino-2-(pent-4-en-1-yl)hept-6-enoic acid
  MOD_RES (6)..(6): L-homoserine
  MOD_RES (7)..(7): N6-isopropyl-L-lysine
  MOD_RES (11)..(11): (S)-3-amino-1-((pent-4-en-1-yloxy)carbonyl)pyrrolidine-3- carboxylic acid
  MOD_RES (13)..(13): (S)-2-amino-3-(benzo[b]thiophen-3-yl)propanoic acid
  C-term amino
XNXXDSKAFLXFXQ

SEQ ID NO: 1820 - protein, 14 aa, Artificial Sequence
  Description of Artificial Sequence: Synthetic peptide
  N-term Acetic Acid
  MOD_RES (1)..(1): (R)-2-allylpyrrolidine-2-carboxylic acid
  MOD_RES (3)..(3): (S)-2-amino-3-cyclohexylpropanoic acid
  MOD_RES (4)..(4): 2-amino-2-(pent-4-en-1-yl)hept-6-enoic acid
  MOD_RES (7)..(7): N6-isopropyl-L-lysine
  MOD_RES (11)..(11): (S)-3-amino-1-((pent-4-en-1-yloxy)carbonyl)pyrrolidine-3- carboxylic acid
  MOD_RES (13)..(13): (S)-2-amino-3-(benzo[b]thiophen-3-yl)propanoic acid
  C-term amino
XNXXDKKAFLXFXQ

SEQ ID NO: 1821 - protein, 14 aa, Artificial Sequence
  Description of Artificial Sequence: Synthetic peptide
  N-term Acetic Acid
  MOD_RES (1)..(1): (R)-2-allylpyrrolidine-2-carboxylic acid
  MOD_RES (3)..(3): (S)-2-amino-3-cyclohexylpropanoic acid
  MOD_RES (4)..(4): 2-amino-2-(pent-4-en-1-yl)hept-6-enoic acid
  MOD_RES (7)..(7): N6-isopropyl-L-lysine
  MOD_RES (11)..(11): (S)-3-amino-1-((pent-4-en-1-yloxy)carbonyl)pyrrolidine-3- carboxylic acid
  MOD_RES (13)..(13): (S)-2-amino-3-(benzo[b]thiophen-3-yl)propanoic acid
  C-term amino
XNXXDHKAFLXFXQ

SEQ ID NO: 1822 - protein, 14 aa, Artificial Sequence
  Description of Artificial Sequence: Synthetic peptide
  N-term Acetic Acid
  MOD_RES (1)..(1): (R)-2-allylpyrrolidine-2-carboxylic acid
  MOD_RES (3)..(3): (S)-2-amino-3-cyclohexylpropanoic acid
  MOD_RES (4)..(4): 2-amino-2-(pent-4-en-1-yl)hept-6-enoic acid
  MOD_RES (7)..(7): N6-isopropyl-L-lysine
  MOD_RES (11)..(11): (S)-3-amino-1-((pent-4-en-1-yloxy)carbonyl)pyrrolidine-3- carboxylic acid
  MOD_RES (13)..(13): (S)-2-amino-3-(benzo[b]thiophen-3-yl)propanoic acid
  C-term amino
XNXXDQKAFLXFXK

SEQ ID NO: 1823 - protein, 14 aa, Artificial Sequence
  Description of Artificial Sequence: Synthetic peptide
  N-term Acetic Acid
  MOD_RES (1)..(1): (R)-2-allylpyrrolidine-2-carboxylic acid
  MOD_RES (3)..(3): (S)-2-amino-3-cyclohexylpropanoic acid
  MOD_RES (4)..(4): 2-amino-2-(pent-4-en-1-yl)hept-6-enoic acid
  MOD_RES (7)..(7): N6-isopropyl-L-lysine
  MOD_RES (11)..(11): (S)-3-amino-1-((pent-4-en-1-yloxy)carbonyl)pyrrolidine-3- carboxylic acid
  MOD_RES (13)..(13): (S)-2-amino-3-(benzo[b]thiophen-3-yl)propanoic acid
  C-term amino
XNXXDQKAFLXFXH

SEQ ID NO: 1824 - protein, 14 aa, Artificial Sequence
  Description of Artificial Sequence: Synthetic peptide
  N-term Acetic Acid
  MOD_RES (1)..(1): (R)-2-allylpyrrolidine-2-carboxylic acid
  MOD_RES (3)..(3): (S)-2-amino-3-cyclohexylpropanoic acid
  MOD_RES (4)..(4): 2-amino-2-(pent-4-en-1-yl)hept-6-enoic acid
  MOD_RES (7)..(7): N6-isopropyl-L-lysine
  MOD_RES (11)..(11): (S)-3-amino-1-((pent-4-en-1-yloxy)carbonyl)pyrrolidine-3- carboxylic acid
  MOD_RES (13)..(13): (S)-2-amino-3-(benzo[b]thiophen-3-yl)propanoic acid
  C-term amino
XNXXDQKAFLXFXA

SEQ ID NO: 1825 - protein, 14 aa, Artificial Sequence
  Description of Artificial Sequence: Synthetic peptide
  N-term Acetic Acid
  MOD_RES (1)..(1): (R)-2-allylpyrrolidine-2-carboxylic acid
  MOD_RES (2)..(2): L-homoserine
  MOD_RES (3)..(3): (S)-2-amino-3-cyclohexylpropanoic acid
  MOD_RES (4)..(4): 2-amino-2-(pent-4-en-1-yl)hept-6-enoic acid
  MOD_RES (7)..(7): N6-isopropyl-L-lysine
  MOD_RES (11)..(11): (S)-3-amino-1-((pent-4-en-1-yloxy)carbonyl)pyrrolidine-3- carboxylic acid
  MOD_RES (13)..(13): (S)-2-amino-3-(benzo[b]thiophen-3-yl)propanoic acid
  C-term amino
XSXXDQKAFLXFXQ

SEQ ID NO: 1826 - protein, 14 aa, Artificial Sequence
  Description of Artificial Sequence: Synthetic peptide
  N-term Acetic Acid
  MOD_RES (1)..(1): (R)-2-allylpyrrolidine-2-carboxylic acid
  MOD_RES (3)..(3): (S)-2-amino-3-cyclohexylpropanoic acid
  MOD_RES (4)..(4): 2-amino-2-(pent-4-en-1-yl)hept-6-enoic acid
  MOD_RES (7)..(7): L-homoserine
  MOD_RES (11)..(11): (S)-3-amino-1-((pent-4-en-1-yloxy)carbonyl)pyrrolidine-3- carboxylic acid
  MOD_RES (13)..(13): (S)-2-amino-3-(benzo[b]thiophen-3-yl)propanoic acid
  C-term amino
XNXXDQSAFLXFXQ

SEQ ID NO: 1827 - protein, 14 aa, Artificial Sequence
  Description of Artificial Sequence: Synthetic peptide
  N-term Acetic Acid
  MOD_RES (1)..(1): (R)-2-allylpyrrolidine-2-carboxylic acid
  MOD_RES (2)..(2): (S)-2-amino-4-ethoxy-4-oxobutanoic acid
  MOD_RES (3)..(3): (S)-2-amino-4,4-dimethylpentanoic acid
  MOD_RES (4)..(4): 2-amino-2-(pent-4-en-1-yl)hept-6-enoic acid
  MOD_RES (11)..(11): (S)-3-amino-1-((pent-4-en-1-yloxy)carbonyl)pyrrolidine-3- carboxylic acid
  MOD_RES (12)..(12): (S)-2-amino-3-(thiophen-3-yl)propanoic acid
  MOD_RES (13)..(13): (S)-2-amino-3-(benzo[b]thiophen-3-yl)propanoic acid
  C-term amino
XXXXDDAAFLXXXQ

SEQ ID NO: 1828 - protein, 14 aa, Artificial Sequence
  Description of Artificial Sequence: Synthetic peptide
  N-term Acetic Acid
  MOD_RES (1)..(1): (R)-2-allylpyrrolidine-2-carboxylic acid
  MOD_RES (3)..(3): (S)-2-amino-4,4-dimethylpentanoic acid
  MOD_RES (4)..(4): 2-amino-2-(pent-4-en-1-yl)hept-6-enoic acid
  MOD_RES (5)..(5): (S)-2-amino-4-ethoxy-4-oxobutanoic acid
  MOD_RES (11)..(11): (S)-3-amino-1-((pent-4-en-1-yloxy)carbonyl)pyrrolidine-3- carboxylic acid
  MOD_RES (12)..(12): (S)-2-amino-3-(thiophen-3-yl)propanoic acid
  MOD_RES (13)..(13): (S)-2-amino-3-(benzo[b]thiophen-3-yl)propanoic acid
  C-term amino
XDXXXDAAFLXXXQ

SEQ ID NO: 1829 - protein, 14 aa, Artificial Sequence
  Description of Artificial Sequence: Synthetic peptide
  N-term Acetic Acid
  MOD_RES (1)..(1): (R)-2-allylpyrrolidine-2-carboxylic acid
  MOD_RES (3)..(3): (S)-2-amino-4,4-dimethylpentanoic acid
  MOD_RES (4)..(4): 2-amino-2-(pent-4-en-1-yl)hept-6-enoic acid
  MOD_RES (6)..(6): (S)-2-amino-4-ethoxy-4-oxobutanoic acid
  MOD_RES (11)..(11): (S)-3-amino-1-((pent-4-en-1-yloxy)carbonyl)pyrrolidine-3- carboxylic acid
  MOD_RES (12)..(12): (S)-2-amino-3-(thiophen-3-yl)propanoic acid
  MOD_RES (13)..(13): (S)-2-amino-3-(benzo[b]thiophen-3-yl)propanoic acid
  C-term amino
XDXXDXAAFLXXXQ

SEQ ID NO: 1830 - protein, 14 aa, Artificial Sequence
  Description of Artificial Sequence: Synthetic peptide
  N-term Acetic Acid
  MOD_RES (1)..(1): (R)-2-allylpyrrolidine-2-carboxylic acid
  MOD_RES (2)..(2): (S)-2-amino-4-methoxy-4-oxobutanoic acid
  MOD_RES (3)..(3): (S)-2-amino-4,4-dimethylpentanoic acid
  MOD_RES (4)..(4): 2-amino-2-(pent-4-en-1-yl)hept-6-enoic acid
  MOD_RES (11)..(11): (S)-3-amino-1-((pent-4-en-1-yloxy)carbonyl)pyrrolidine-3- carboxylic acid
  MOD_RES (12)..(12): (S)-2-amino-3-(thiophen-3-yl)propanoic acid
  MOD_RES (13)..(13): (S)-2-amino-3-(benzo[b]thiophen-3-yl)propanoic acid
  C-term amino
XXXXDDAAFLXXXQ

SEQ ID NO: 1831 - protein, 14 aa, Artificial Sequence
  Description of Artificial Sequence: Synthetic peptide
  N-term Acetic Acid
  MOD_RES (1)..(1): (R)-2-allylpyrrolidine-2-carboxylic acid
  MOD_RES (3)..(3): (S)-2-amino-4,4-dimethylpentanoic acid
  MOD_RES (4)..(4): 2-amino-2-(pent-4-en-1-yl)hept-6-enoic acid
  MOD_RES (5)..(5): (S)-2-amino-4-methoxy-4-oxobutanoic acid
  MOD_RES (11)..(11): (S)-3-amino-1-((pent-4-en-1-yloxy)carbonyl)pyrrolidine-3- carboxylic acid
  MOD_RES (12)..(12): (S)-2-amino-3-(thiophen-3-yl)propanoic acid
  MOD_RES (13)..(13): (S)-2-amino-3-(benzo[b]thiophen-3-yl)propanoic acid
  C-term amino
XDXXXDAAFLXXXQ

SEQ ID NO: 1832 - protein, 14 aa, Artificial Sequence
  Description of Artificial Sequence: Synthetic peptide
  N-term Acetic Acid
  MOD_RES (1)..(1): (R)-2-allylpyrrolidine-2-carboxylic acid
  MOD_RES (3)..(3): (S)-2-amino-4,4-dimethylpentanoic acid
  MOD_RES (4)..(4): 2-amino-2-(pent-4-en-1-yl)hept-6-enoic acid
  MOD_RES (6)..(6): (S)-2-amino-4-methoxy-4-oxobutanoic acid
  MOD_RES (11)..(11): (S)-3-amino-1-((pent-4-en-1-yloxy)carbonyl)pyrrolidine-3- carboxylic acid
  MOD_RES (12)..(12): (S)-2-amino-3-(thiophen-3-yl)propanoic acid
  MOD_RES (13)..(13): (S)-2-amino-3-(benzo[b]thiophen-3-yl)propanoic acid
  C-term amino
XDXXDXAAFLXXXQ

SEQ ID NO: 1833 - protein, 14 aa, Artificial Sequence
  Description of Artificial Sequence: Synthetic peptide
  N-term methyl hydrogen carbonate
  MOD_RES (1)..(1): (R)-2-allylpyrrolidine-2-carboxylic acid
  MOD_RES (3)..(3): (S)-2-amino-4,4-dimethylpentanoic acid
  MOD_RES (4)..(4): 2-amino-2-(pent-4-en-1-yl)hept-6-enoic acid
  MOD_RES (11)..(11): (S)-3-amino-1-((pent-4-en-1-yloxy)carbonyl)pyrrolidine-3- carboxylic acid
  MOD_RES (12)..(12): (S)-2-amino-3-(thiophen-3-yl)propanoic acid
  MOD_RES (13)..(13): (S)-2-amino-3-(benzo[b]thiophen-3-yl)propanoic acid
  C-term amino
XDXXDDAAFQXXXH

SEQ ID NO: 1834 - protein, 14 aa, Artificial Sequence
  Description of Artificial Sequence: Synthetic peptide
  N-term butyl hydrogen carbonate
  MOD_RES (1)..(1): (R)-2-allylpyrrolidine-2-carboxylic acid
  MOD_RES (3)..(3): (S)-2-amino-4,4-dimethylpentanoic acid
  MOD_RES (4)..(4): 2-amino-2-(pent-4-en-1-yl)hept-6-enoic acid
  MOD_RES (11)..(11): (S)-3-amino-1-((pent-4-en-1-yloxy)carbonyl)pyrrolidine-3- carboxylic acid
  MOD_RES (12)..(12): (S)-2-amino-3-(thiophen-3-yl)propanoic acid
  MOD_RES (13)..(13): (S)-2-amino-3-(benzo[b]thiophen-3-yl)propanoic acid
  C-term amino
XDXXDDAAFQXXXH

SEQ ID NO: 1835 - protein, 14 aa, Artificial Sequence
  Description of Artificial Sequence: Synthetic peptide
  N-term isobutyl hydrogen carbonate
  MOD_RES (1)..(1): (R)-2-allylpyrrolidine-2-carboxylic acid
  MOD_RES (3)..(3): (S)-2-amino-4,4-dimethylpentanoic acid
  MOD_RES (4)..(4): 2-amino-2-(pent-4-en-1-yl)hept-6-enoic acid
  MOD_RES (11)..(11): (S)-3-amino-1-((pent-4-en-1-yloxy)carbonyl)pyrrolidine-3- carboxylic acid
  MOD_RES (12)..(12): (S)-2-amino-3-(thiophen-3-yl)propanoic acid
  MOD_RES (13)..(13): (S)-2-amino-3-(benzo[b]thiophen-3-yl)propanoic acid
  C-term amino
XDXXDDAAFQXXXH

SEQ ID NO: 1836 - protein, 14 aa, Artificial Sequence
  Description of Artificial Sequence: Synthetic peptide
  N-term Acetic Acid
  MOD_RES (1)..(1): (R)-2-allylpyrrolidine-2-carboxylic acid
  MOD_RES (3)..(3): (S)-2-amino-4,4-dimethylpentanoic acid
  MOD_RES (4)..(4): 2-amino-2-(pent-4-en-1-yl)hept-6-enoic acid
  MOD_RES (6)..(6): (S)-2-amino-5-ethoxy-5-oxopentanoic acid
  MOD_RES (11)..(11): (S)-3-amino-1-((pent-4-en-1-yloxy)carbonyl)pyrrolidine-3- carboxylic acid
  MOD_RES (12)..(12): (S)-2-amino-3-(thiophen-3-yl)propanoic acid
  MOD_RES (13)..(13): (S)-2-amino-3-(benzo[b]thiophen-3-yl)propanoic acid
  C-term amino
XDXXDXAAFLXXXQ

SEQ ID NO: 1837 - protein, 14 aa, Artificial Sequence
  Description of Artificial Sequence: Synthetic peptide
  N-term Acetic Acid
  MOD_RES (1)..(1): (R)-2-allylpyrrolidine-2-carboxylic acid
  MOD_RES (3)..(3): (S)-2-amino-4,4-dimethylpentanoic acid
  MOD_RES (4)..(4): 2-amino-2-(pent-4-en-1-yl)hept-6-enoic acid
  MOD_RES (6)..(6): (S)-2-amino-5-methoxy-5-oxopentanoic acid
  MOD_RES (11)..(11): (S)-3-amino-1-((pent-4-en-1-yloxy)carbonyl)pyrrolidine-3- carboxylic acid
  MOD_RES (12)..(12): (S)-2-amino-3-(thiophen-3-yl)propanoic acid
  MOD_RES (13)..(13): (S)-2-amino-3-(benzo[b]thiophen-3-yl)propanoic acid
  C-term amino
XDXXDXAAFLXXXQ

SEQ ID NO: 1838 - protein, 14 aa, Artificial Sequence
  Description of Artificial Sequence: Synthetic peptide
  N-term Acetic Acid
  MOD_RES (1)..(1): (R)-2-allylpyrrolidine-2-carboxylic acid
  MOD_RES (3)..(3): (S)-2-amino-4,4-dimethylpentanoic acid
  MOD_RES (4)..(4): 2-amino-2-(pent-4-en-1-yl)hept-6-enoic acid
  MOD_RES (6)..(6): (S)-2-amino-3-(4-(2-carboxyethyl)-1H-1,2,3-triazol-1-yl) propanoic acid
  MOD_RES (11)..(11): (S)-3-amino-1-((pent-4-en-1-yloxy)carbonyl)pyrrolidine-3- carboxylic acid
  MOD_RES (12)..(12): (S)-2-amino-3-(2-(trifluoromethyl)phenyl)propanoic acid
  MOD_RES (13)..(13): (S)-2-amino-3-(benzo[b]thiophen-3-yl)propanoic acid
  C-term amino
XDXXDXQAFLXFXA

SEQ ID NO: 1839 - protein, 14 aa, Artificial Sequence
  Description of Artificial Sequence: Synthetic peptide
  N-term Acetic Acid
  MOD_RES (1)..(1): (R)-2-allylpyrrolidine-2-carboxylic acid
  MOD_RES (3)..(3): (S)-2-amino-4,4-dimethylpentanoic acid
  MOD_RES (4)..(4): 2-amino-2-(pent-4-en-1-yl)hept-6-enoic acid
  MOD_RES (6)..(6): (S)-3-(1-(2-amino-2-carboxyethyl)-1H-1,2,3-triazol-4-yl)-2,2 -dimethylpropanoic acid
  MOD_RES (11)..(11): (S)-3-amino-1-((pent-4-en-1-yloxy)carbonyl)pyrrolidine-3- carboxylic acid
  MOD_RES (12)..(12): (S)-2-amino-3-(2-(trifluoromethyl)phenyl)propanoic acid
  MOD_RES (13)..(13): (S)-2-amino-3-(benzo[b]thiophen-3-yl)propanoic acid
  C-term amino
XDXXDXQAFLXFXA

SEQ ID NO: 1840 - protein, 14 aa, Artificial Sequence
  Description of Artificial Sequence: Synthetic peptide
  N-term Acetic Acid
  MOD_RES (1)..(1): (R)-2-allylpyrrolidine-2-carboxylic acid
  MOD_RES (3)..(3): (S)-2-amino-4,4-dimethylpentanoic acid
  MOD_RES (4)..(4): 2-amino-2-(pent-4-en-1-yl)hept-6-enoic acid
  MOD_RES (6)..(6): (S)-2-amino-3-(4-(2-carboxypropan-2-yl)-1H-1,2,3-triazol-1-yl) propanoic acid
  MOD_RES (11)..(11): (S)-3-amino-1-((pent-4-en-1-yloxy)carbonyl)pyrrolidine-3- carboxylic acid
  MOD_RES (12)..(12): (S)-2-amino-3-(2-(trifluoromethyl)phenyl)propanoic acid
  MOD_RES (13)..(13): (S)-2-amino-3-(benzo[b]thiophen-3-yl)propanoic acid
  C-term amino
XDXXDXQAFLXFXA

SEQ ID NO: 1841 - protein, 14 aa, Artificial Sequence
  Description of Artificial Sequence: Synthetic peptide
  N-term Acetic Acid
  MOD_RES (1)..(1): (R)-2-allylpyrrolidine-2-carboxylic acid
  MOD_RES (3)..(3): (S)-2-amino-4,4-dimethylpentanoic acid
  MOD_RES (4)..(4): 2-amino-2-(pent-4-en-1-yl)hept-6-enoic acid
  MOD_RES (6)..(6): (S)-2-amino-3-(4-(2-carboxyethyl)-1H-1,2,3-triazol-1-yl) propanoic acid
  MOD_RES (11)..(11): (S)-3-amino-1-((pent-4-en-1-yloxy)carbonyl)pyrrolidine-3- carboxylic acid
  MOD_RES (12)..(12): (S)-2-amino-3-(2-(trifluoromethyl)phenyl)propanoic acid
  MOD_RES (13)..(13): (S)-2-amino-3-(benzo[b]thiophen-3-yl)propanoic acid
  C-term amino
XDXXDXAAFLXFXS

SEQ ID NO: 1842 - protein, 14 aa, Artificial Sequence
  Description of Artificial Sequence: Synthetic peptide
  N-term Acetic Acid
  MOD_RES (1)..(1): (R)-2-allylpyrrolidine-2-carboxylic acid
  MOD_RES (3)..(3): (S)-2-amino-4,4-dimethylpentanoic acid
  MOD_RES (4)..(4): 2-amino-2-(pent-4-en-1-yl)hept-6-enoic acid
  MOD_RES (6)..(6): (S)-3-(1-(2-amino-2-carboxyethyl)-1H-1,2,3-triazol-4-yl)-2,2 -dimethylpropanoic acid
  MOD_RES (11)..(11): (S)-3-amino-1-((pent-4-en-1-yloxy)carbonyl)pyrrolidine-3- carboxylic acid
  MOD_RES (12)..(12): (S)-2-amino-3-(2-(trifluoromethyl)phenyl)propanoic acid
  MOD_RES (13)..(13): (S)-2-amino-3-(benzo[b]thiophen-3-yl)propanoic acid
  C-term amino
XDXXDXAAFLXFXS

SEQ ID NO: 1843 - protein, 14 aa, Artificial Sequence
  Description of Artificial Sequence: Synthetic peptide
  N-term Acetic Acid
  MOD_RES (1)..(1): (R)-2-allylpyrrolidine-2-carboxylic acid
  MOD_RES (3)..(3): (S)-2-amino-4,4-dimethylpentanoic acid
  MOD_RES (4)..(4): 2-amino-2-(pent-4-en-1-yl)hept-6-enoic acid
  MOD_RES (6)..(6): (S)-2-amino-3-(4-(carboxymethyl)-1H-1,2,3-triazol-1-yl) propanoic acid
  MOD_RES (11)..(11): (S)-3-amino-1-((pent-4-en-1-yloxy)carbonyl)pyrrolidine-3- carboxylic acid
  MOD_RES (12)..(12): (S)-2-amino-3-(2-(trifluoromethyl)phenyl)propanoic acid
  MOD_RES (13)..(13): (S)-2-amino-3-(benzo[b]thiophen-3-yl)propanoic acid
  C-term amino
XDXXDXAAFLXFXS

SEQ ID NO: 1844 - protein, 14 aa, Artificial Sequence
  Description of Artificial Sequence: Synthetic peptide
  N-term Acetic Acid
  MOD_RES (1)..(1): (R)-2-allylpyrrolidine-2-carboxylic acid
  MOD_RES (3)..(3): (S)-2-amino-4,4-dimethylpentanoic acid
  MOD_RES (4)..(4): 2-amino-2-(pent-4-en-1-yl)hept-6-enoic acid
  MOD_RES (6)..(6): (S)-2-amino-3-(4-(2-carboxypropan-2-yl)-1H-1,2,3-triazol-1-yl) propanoic acid
  MOD_RES (11)..(11): (S)-3-amino-1-((pent-4-en-1-yloxy)carbonyl)pyrrolidine-3- carboxylic acid
  MOD_RES (12)..(12): (S)-2-amino-3-(2-(trifluoromethyl)phenyl)propanoic acid
  MOD_RES (13)..(13): (S)-2-amino-3-(benzo[b]thiophen-3-yl)propanoic acid
  C-term amino
XDXXDXAAFLXFXS

SEQ ID NO: 1845 - protein, 14 aa, Artificial Sequence
  Description of Artificial Sequence: Synthetic peptide
  N-term Acetic Acid
  MOD_RES (1)..(1): (R)-2-allylpyrrolidine-2-carboxylic acid
  MOD_RES (3)..(3): (S)-2-amino-4,4-dimethylpentanoic acid
  MOD_RES (4)..(4): 2-amino-2-(pent-4-en-1-yl)hept-6-enoic acid
  MOD_RES (11)..(11): (S)-3-amino-1-((pent-4-en-1-yloxy)carbonyl)pyrrolidine-3- carboxylic acid
  MOD_RES (12)..(12): (S)-2-amino-3-(thiophen-3-yl)propanoic acid
  MOD_RES (13)..(13): (S)-2-amino-3-(benzo[b]thiophen-3-yl)propanoic acid
  MOD_RES (14)..(14): (S)-2-amino-6-(4-propyl-1H-1,2,3-triazol-1-yl)hexanoic acid
  C-term amino
XDXXDDAAFLXXXX

SEQ ID NO: 1846 - protein, 14 aa, Artificial Sequence
  Description of Artificial Sequence: Synthetic peptide
  MOD_RES (1)..(1): 3-(allyloxy)benzoic acid
  MOD_RES (3)..(3): (S)-2-amino-4,4-dimethylpentanoic acid
  MOD_RES (4)..(4): 2-amino-2-(pent-4-en-1-yl)hept-6-enoic acid
  MOD_RES (6)..(6): (S)-2-amino-3-((carboxymethyl)(2,2,2-trifluoroethyl)amino) propanoic acid
  MOD_RES (11)..(11): (S)-3-amino-1-((pent-4-en-1-yloxy)carbonyl)pyrrolidine-3- carboxylic acid
  MOD_RES (12)..(12): (S)-2-amino-3-(thiophen-3-yl)propanoic acid
  MOD_RES (13)..(13): (S)-2-amino-3-(benzo[b]thiophen-3-yl)propanoic acid
  C-term amino
XDXXDXAAFLXXXQ

SEQ ID NO: 1847 - protein, 14 aa, Artificial Sequence
  Description of Artificial Sequence: Synthetic peptide
  MOD_RES (1)..(1): (3-(allyloxy)benzoyl)-L-proline
  MOD_RES (3)..(3): (S)-2-amino-4,4-dimethylpentanoic acid
  MOD_RES (4)..(4): 2-amino-2-(pent-4-en-1-yl)hept-6-enoic acid
  MOD_RES (6)..(6): (S)-2-amino-3-((carboxymethyl)(2,2,2-trifluoroethyl)amino) propanoic acid
  MOD_RES (11)..(11): (S)-3-amino-1-((pent-4-en-1-yloxy)carbonyl)pyrrolidine-3- carboxylic acid
  MOD_RES (12)..(12): (S)-2-amino-3-(thiophen-3-yl)propanoic acid
  MOD_RES (13)..(13): (S)-2-amino-3-(benzo[b]thiophen-3-yl)propanoic acid
  C-term amino
PDXXDXAAFLXXXQ

SEQ ID NO: 1848 - protein, 16 aa, Artificial Sequence
  Description of Artificial Sequence: Synthetic peptide
  N-term Acetic Acid
  MOD_RES (1)..(1): (R)-2-allylpyrrolidine-2-carboxylic acid
  MOD_RES (3)..(3): (S)-2-amino-4,4-dimethylpentanoic acid
  MOD_RES (4)..(4): 2-amino-2-(pent-4-en-1-yl)hept-6-enoic acid
  MOD_RES (6)..(6): (S)-3-(2-amino-2-carboxyethyl)benzoic acid
  MOD_RES (11)..(11): (S)-3-amino-1-((pent-4-en-1-yloxy)carbonyl)pyrrolidine-3- carboxylic acid
  MOD_RES (12)..(12): (S)-2-amino-3-(2-(trifluoromethyl)phenyl)propanoic acid
  MOD_RES (13)..(13): (S)-2-amino-3-(benzo[b]thiophen-3-yl)propanoic acid
  C-term amino
XDXXDXAAFLXFXQLA

SEQ ID NO: 1849 - protein, 16 aa, Artificial Sequence
  Description of Artificial Sequence: Synthetic peptide
  N-term Acetic Acid
  MOD_RES (1)..(1): (R)-2-allylpyrrolidine-2-carboxylic acid
  MOD_RES (3)..(3): (S)-2-amino-4,4-dimethylpentanoic acid
  MOD_RES (4)..(4): 2-amino-2-(pent-4-en-1-yl)hept-6-enoic acid
  MOD_RES (6)..(6): (S)-3-(2-amino-2-carboxyethyl)benzoic acid
  MOD_RES (11)..(11): (S)-3-amino-1-((pent-4-en-1-yloxy)carbonyl)pyrrolidine-3- carboxylic acid
  MOD_RES (12)..(12): (S)-2-amino-3-(2-(trifluoromethyl)phenyl)propanoic acid
  MOD_RES (13)..(13): (S)-2-amino-3-(benzo[b]thiophen-3-yl)propanoic acid
  C-term amino
XDXXDXAAFLXFXQLV

SEQ ID NO: 1850 - protein, 16 aa, Artificial Sequence
  Description of Artificial Sequence: Synthetic peptide
  N-term Acetic Acid
  MOD_RES (1)..(1): (R)-2-allylpyrrolidine-2-carboxylic acid
  MOD_RES (3)..(3): (S)-2-amino-4,4-dimethylpentanoic acid
  MOD_RES (4)..(4): 2-amino-2-(pent-4-en-1-yl)hept-6-enoic acid
  MOD_RES (6)..(6): (S)-3-(2-amino-2-carboxyethyl)benzoic acid
  MOD_RES (11)..(11): (S)-3-amino-1-((pent-4-en-1-yloxy)carbonyl)pyrrolidine-3- carboxylic acid
  MOD_RES (12)..(12): (S)-2-amino-3-(2-(trifluoromethyl)phenyl)propanoic acid
  MOD_RES (13)..(13): (S)-2-amino-3-(benzo[b]thiophen-3-yl)propanoic acid
  C-term amino
XDXXDXAAFLXFXQLL

SEQ ID NO: 1851 - protein, 16 aa, Artificial Sequence
  Description of Artificial Sequence: Synthetic peptide
  N-term Acetic Acid
  MOD_RES (1)..(1): (R)-2-allylpyrrolidine-2-carboxylic acid
  MOD_RES (3)..(3): (S)-2-amino-4,4-dimethylpentanoic acid
  MOD_RES (4)..(4): 2-amino-2-(pent-4-en-1-yl)hept-6-enoic acid
  MOD_RES (6)..(6): (S)-3-(2-amino-2-carboxyethyl)benzoic acid
  MOD_RES (11)..(11): (S)-3-amino-1-((pent-4-en-1-yloxy)carbonyl)pyrrolidine-3- carboxylic acid
  MOD_RES (12)..(12): (S)-2-amino-3-(2-(trifluoromethyl)phenyl)propanoic acid
  MOD_RES (13)..(13): (S)-2-amino-3-(benzo[b]thiophen-3-yl)propanoic acid
  C-term amino
XDXXDXAAFLXFXQLF

SEQ ID NO: 1852 - protein, 16 aa, Artificial Sequence
  Description of Artificial Sequence: Synthetic peptide
  N-term Acetic Acid
  MOD_RES (1)..(1): (R)-2-allylpyrrolidine-2-carboxylic acid
  MOD_RES (3)..(3): (S)-2-amino-4,4-dimethylpentanoic acid
  MOD_RES (4)..(4): 2-amino-2-(pent-4-en-1-yl)hept-6-enoic acid
  MOD_RES (6)..(6): (S)-3-(2-amino-2-carboxyethyl)benzoic acid
  MOD_RES (11)..(11): (S)-3-amino-1-((pent-4-en-1-yloxy)carbonyl)pyrrolidine-3- carboxylic acid
  MOD_RES (12)..(12): (S)-2-amino-3-(2-(trifluoromethyl)phenyl)propanoic acid
  MOD_RES (13)..(13): (S)-2-amino-3-(benzo[b]thiophen-3-yl)propanoic acid
  C-term amino
XDXXDXAAFLXFXQLQ

SEQ ID NO: 1853 - protein, 16 aa, Artificial Sequence
  Description of Artificial Sequence: Synthetic peptide
  N-term Acetic Acid
  MOD_RES (1)..(1): (R)-2-allylpyrrolidine-2-carboxylic acid
  MOD_RES (3)..(3): (S)-2-amino-4,4-dimethylpentanoic acid
  MOD_RES (4)..(4): 2-amino-2-(pent-4-en-1-yl)hept-6-enoic acid
  MOD_RES (6)..(6): (S)-3-(2-amino-2-carboxyethyl)benzoic acid
  MOD_RES (11)..(11): (S)-3-amino-1-((pent-4-en-1-yloxy)carbonyl)pyrrolidine-3- carboxylic acid
  MOD_RES (12)..(12): (S)-2-amino-3-(2-(trifluoromethyl)phenyl)propanoic acid
  MOD_RES (13)..(13): (S)-2-amino-3-(benzo[b]thiophen-3-yl)propanoic acid
  C-term amino
XDXXDXAAFLXFXQLT

SEQ ID NO: 1854 - protein, 16 aa, Artificial Sequence
  Description of Artificial Sequence: Synthetic peptide
  N-term Acetic Acid
  MOD_RES (1)..(1): (R)-2-allylpyrrolidine-2-carboxylic acid
  MOD_RES (3)..(3): (S)-2-amino-4,4-dimethylpentanoic acid
  MOD_RES (4)..(4): 2-amino-2-(pent-4-en-1-yl)hept-6-enoic acid
  MOD_RES (6)..(6): (S)-3-(2-amino-2-carboxyethyl)benzoic acid
  MOD_RES (11)..(11): (S)-3-amino-1-((pent-4-en-1-yloxy)carbonyl)pyrrolidine-3- carboxylic acid
  MOD_RES (12)..(12): (S)-2-amino-3-(2-(trifluoromethyl)phenyl)propanoic acid
  MOD_RES (13)..(13): (S)-2-amino-3-(benzo[b]thiophen-3-yl)propanoic acid
  C-term amino
XDXXDXAAFLXFXQLS

SEQ ID NO: 1855 - protein, 16 aa, Artificial Sequence
  Description of Artificial Sequence: Synthetic peptide
  N-term Acetic Acid
  MOD_RES (1)..(1): (R)-2-allylpyrrolidine-2-carboxylic acid
  MOD_RES (3)..(3): (S)-2-amino-4,4-dimethylpentanoic acid
  MOD_RES (4)..(4): 2-amino-2-(pent-4-en-1-yl)hept-6-enoic acid
  MOD_RES (6)..(6): (S)-3-(2-amino-2-carboxyethyl)benzoic acid
  MOD_RES (11)..(11): (S)-3-amino-1-((pent-4-en-1-yloxy)carbonyl)pyrrolidine-3- carboxylic acid
  MOD_RES (12)..(12): (S)-2-amino-3-(2-(trifluoromethyl)phenyl)propanoic acid
  MOD_RES (13)..(13): (S)-2-amino-3-(benzo[b]thiophen-3-yl)propanoic acid
  C-term amino
XDXXDXAAFLXFXQLI

SEQ ID NO: 1856 - protein, 16 aa, Artificial Sequence
  Description of Artificial Sequence: Synthetic peptide
  N-term Acetic Acid
  MOD_RES (1)..(1): (R)-2-allylpyrrolidine-2-carboxylic acid
  MOD_RES (3)..(3): (S)-2-amino-4,4-dimethylpentanoic acid
  MOD_RES (4)..(4): 2-amino-2-(pent-4-en-1-yl)hept-6-enoic acid
  MOD_RES (6)..(6): (S)-3-(2-amino-2-carboxyethyl)benzoic acid
  MOD_RES (11)..(11): (S)-3-amino-1-((pent-4-en-1-yloxy)carbonyl)pyrrolidine-3- carboxylic acid
  MOD_RES (12)..(12): (S)-2-amino-3-(2-(trifluoromethyl)phenyl)propanoic acid
  MOD_RES (13)..(13): (S)-2-amino-3-(benzo[b]thiophen-3-yl)propanoic acid
  MOD_RES (16)..(16): 2-amino-2-methylpropanoic acid
  C-term amino
XDXXDXAAFLXFXQLX

SEQ ID NO: 1857 - protein, 16 aa, Artificial Sequence
  Description of Artificial Sequence: Synthetic peptide
  N-term Acetic Acid
  MOD_RES (1)..(1): (R)-2-allylpyrrolidine-2-carboxylic acid
  MOD_RES (3)..(3): (S)-2-amino-4,4-dimethylpentanoic acid
  MOD_RES (4)..(4): 2-amino-2-(pent-4-en-1-yl)hept-6-enoic acid
  MOD_RES (6)..(6): (S)-3-(2-amino-2-carboxyethyl)benzoic acid
  MOD_RES (11)..(11): (S)-3-amino-1-((pent-4-en-1-yloxy)carbonyl)pyrrolidine-3- carboxylic acid
  MOD_RES (12)..(12): (S)-2-amino-3-(2-(trifluoromethyl)phenyl)propanoic acid
  MOD_RES (13)..(13): (S)-2-amino-3-(benzo[b]thiophen-3-yl)propanoic acid
  MOD_RES (16)..(16): 1-aminocyclopentane-1-carboxylic acid
  C-term amino
XDXXDXAAFLXFXQLX

SEQ ID NO: 1858 - protein, 16 aa, Artificial Sequence
  Description of Artificial Sequence: Synthetic peptide
  N-term Acetic Acid
  MOD_RES (1)..(1): (R)-2-allylpyrrolidine-2-carboxylic acid
  MOD_RES (3)..(3): (S)-2-amino-4,4-dimethylpentanoic acid
  MOD_RES (4)..(4): 2-amino-2-(pent-4-en-1-yl)hept-6-enoic acid
  MOD_RES (6)..(6): (S)-3-(2-amino-2-carboxyethyl)benzoic acid
  MOD_RES (11)..(11): (S)-3-amino-1-((pent-4-en-1-yloxy)carbonyl)pyrrolidine-3- carboxylic acid
  MOD_RES (12)..(12): (S)-2-amino-3-(2-(trifluoromethyl)phenyl)propanoic acid
  MOD_RES (13)..(13): (S)-2-amino-3-(benzo[b]thiophen-3-yl)propanoic acid
  MOD_RES (16)..(16): 1-aminocyclobutane-1-carboxylic acid
  C-term amino
XDXXDXAAFLXFXQLX

SEQ ID NO: 1859 - protein, 16 aa, Artificial Sequence
  Description of Artificial Sequence: Synthetic peptide
  N-term Acetic Acid
  MOD_RES (1)..(1): (R)-2-allylpyrrolidine-2-carboxylic acid
  MOD_RES (3)..(3): (S)-2-amino-4,4-dimethylpentanoic acid
  MOD_RES (4)..(4): 2-amino-2-(pent-4-en-1-yl)hept-6-enoic acid
  MOD_RES (6)..(6): (S)-3-(2-amino-2-carboxyethyl)benzoic acid
  MOD_RES (11)..(11): (S)-3-amino-1-((pent-4-en-1-yloxy)carbonyl)pyrrolidine-3- carboxylic acid
  MOD_RES (12)..(12): (S)-2-amino-3-(2-(trifluoromethyl)phenyl)propanoic acid
  MOD_RES (13)..(13): (S)-2-amino-3-(benzo[b]thiophen-3-yl)propanoic acid
  MOD_RES (16)..(16): 1-aminocyclopropane-1-carboxylic acid
  C-term amino
XDXXDXAAFLXFXQLX

SEQ ID NO: 1860 - protein, 16 aa, Artificial Sequence
  Description of Artificial Sequence: Synthetic peptide
  N-term Acetic Acid
  MOD_RES (1)..(1): (R)-2-allylpyrrolidine-2-carboxylic acid
  MOD_RES (3)..(3): (S)-2-amino-4,4-dimethylpentanoic acid
  MOD_RES (4)..(4): 2-amino-2-(pent-4-en-1-yl)hept-6-enoic acid
  MOD_RES (6)..(6): (S)-3-(2-amino-2-carboxyethyl)benzoic acid
  MOD_RES (11)..(11): (S)-3-amino-1-((pent-4-en-1-yloxy)carbonyl)pyrrolidine-3- carboxylic acid
  MOD_RES (12)..(12): (S)-2-amino-3-(2-(trifluoromethyl)phenyl)propanoic acid
  MOD_RES (13)..(13): (S)-2-amino-3-(benzo[b]thiophen-3-yl)propanoic acid
  C-term amino
XDXXDXAAFLXFXQLN

SEQ ID NO: 1861 - protein, 16 aa, Artificial Sequence
  Description of Artificial Sequence: Synthetic peptide
  N-term Acetic Acid
  MOD_RES (1)..(1): (R)-2-allylpyrrolidine-2-carboxylic acid
  MOD_RES (3)..(3): (S)-2-amino-4,4-dimethylpentanoic acid
  MOD_RES (4)..(4): 2-amino-2-(pent-4-en-1-yl)hept-6-enoic acid
  MOD_RES (6)..(6): (S)-3-(2-amino-2-carboxyethyl)benzoic acid
  MOD_RES (11)..(11): (S)-3-amino-1-((pent-4-en-1-yloxy)carbonyl)pyrrolidine-3- carboxylic acid
  MOD_RES (12)..(12): (S)-2-amino-3-(2-(trifluoromethyl)phenyl)propanoic acid
  MOD_RES (13)..(13): (S)-2-amino-3-(benzo[b]thiophen-3-yl)propanoic acid
  MOD_RES (16)..(16): (S)-2-aminohexanoic acid
  C-term amino
XDXXDXAAFLXFXQLX

SEQ ID NO: 1862 - protein, 16 aa, Artificial Sequence
  Description of Artificial Sequence: Synthetic peptide
  N-term Acetic Acid
  MOD_RES (1)..(1): (R)-2-allylpyrrolidine-2-carboxylic acid
  MOD_RES (3)..(3): (S)-2-amino-4,4-dimethylpentanoic acid
  MOD_RES (4)..(4): 2-amino-2-(pent-4-en-1-yl)hept-6-enoic acid
  MOD_RES (6)..(6): (S)-3-(2-amino-2-carboxyethyl)benzoic acid
  MOD_RES (11)..(11): (S)-3-amino-1-((pent-4-en-1-yloxy)carbonyl)pyrrolidine-3- carboxylic acid
  MOD_RES (12)..(12): (S)-2-amino-3-(2-(trifluoromethyl)phenyl)propanoic acid
  MOD_RES (13)..(13): (S)-2-amino-3-(benzo[b]thiophen-3-yl)propanoic acid
  C-term amino
XDXXDXAAFLXFXQLY

SEQ ID NO: 1863 - protein, 16 aa, Artificial Sequence
  Description of Artificial Sequence: Synthetic peptide
  N-term Acetic Acid
  MOD_RES (1)..(1): (R)-2-allylpyrrolidine-2-carboxylic acid
  MOD_RES (3)..(3): (S)-2-amino-4,4-dimethylpentanoic acid
  MOD_RES (4)..(4): 2-amino-2-(pent-4-en-1-yl)hept-6-enoic acid
  MOD_RES (6)..(6): (S)-3-(2-amino-2-carboxyethyl)benzoic acid
  MOD_RES (11)..(11): (S)-3-amino-1-((pent-4-en-1-yloxy)carbonyl)pyrrolidine-3- carboxylic acid
  MOD_RES (12)..(12): (S)-2-amino-3-(2-(trifluoromethyl)phenyl)propanoic acid
  MOD_RES (13)..(13): (S)-2-amino-3-(benzo[b]thiophen-3-yl)propanoic acid
  C-term amino
XDXXDXAAFLXFXQLR

SEQ ID NO: 1864 - protein, 16 aa, Artificial Sequence
  Description of Artificial Sequence: Synthetic peptide
  N-term Acetic Acid
  MOD_RES (1)..(1): (R)-2-allylpyrrolidine-2-carboxylic acid
  MOD_RES (3)..(3): (S)-2-amino-4,4-dimethylpentanoic acid
  MOD_RES (4)..(4): 2-amino-2-(pent-4-en-1-yl)hept-6-enoic acid
  MOD_RES (6)..(6): (S)-3-(2-amino-2-carboxyethyl)benzoic acid
  MOD_RES (11)..(11): (S)-3-amino-1-((pent-4-en-1-yloxy)carbonyl)pyrrolidine-3- carboxylic acid
  MOD_RES (12)..(12): (S)-2-amino-3-(2-(trifluoromethyl)phenyl)propanoic acid
  MOD_RES (13)..(13): (S)-2-amino-3-(benzo[b]thiophen-3-yl)propanoic acid
  C-term amino
XDXXDXAAFLXFXQLW

SEQ ID NO: 1865 - protein, 16 aa, Artificial Sequence
  Description of Artificial Sequence: Synthetic peptide
  N-term Acetic Acid
  MOD_RES (1)..(1): (R)-2-allylpyrrolidine-2-carboxylic acid
  MOD_RES (3)..(3): (S)-2-amino-4,4-dimethylpentanoic acid
  MOD_RES (4)..(4): 2-amino-2-(pent-4-en-1-yl)hept-6-enoic acid
  MOD_RES (6)..(6): (S)-3-(2-amino-2-carboxyethyl)benzoic acid
  MOD_RES (11)..(11): (S)-3-amino-1-((pent-4-en-1-yloxy)carbonyl)pyrrolidine-3- carboxylic acid
  MOD_RES (12)..(12): (S)-2-amino-3-(2-(trifluoromethyl)phenyl)propanoic acid
  MOD_RES (13)..(13): (S)-2-amino-3-(benzo[b]thiophen-3-yl)propanoic acid
  MOD_RES (16)..(16): D-alanine
  C-term amino
XDXXDXAAFLXFXQLA

SEQ ID NO: 1866 - protein, 16 aa, Artificial Sequence
  Description of Artificial Sequence: Synthetic peptide
  N-term Acetic Acid
  MOD_RES (1)..(1): (R)-2-allylpyrrolidine-2-carboxylic acid
  MOD_RES (3)..(3): (S)-2-amino-4,4-dimethylpentanoic acid
  MOD_RES (4)..(4): 2-amino-2-(pent-4-en-1-yl)hept-6-enoic acid
  MOD_RES (6)..(6): (S)-3-(2-amino-2-carboxyethyl)benzoic acid
  MOD_RES (11)..(11): (S)-3-amino-1-((pent-4-en-1-yloxy)carbonyl)pyrrolidine-3- carboxylic acid
  MOD_RES (12)..(12): (S)-2-amino-3-(2-(trifluoromethyl)phenyl)propanoic acid
  MOD_RES (13)..(13): (S)-2-amino-3-(benzo[b]thiophen-3-yl)propanoic acid
  MOD_RES (16)..(16): D-leucine
  C-term amino
XDXXDXAAFLXFXQLL

SEQ ID NO: 1867 - protein, 16 aa, Artificial Sequence
  Description of Artificial Sequence: Synthetic peptide
  N-term Acetic Acid
  MOD_RES (1)..(1): (R)-2-allylpyrrolidine-2-carboxylic acid
  MOD_RES (3)..(3): (S)-2-amino-4,4-dimethylpentanoic acid
  MOD_RES (4)..(4): 2-amino-2-(pent-4-en-1-yl)hept-6-enoic acid
  MOD_RES (6)..(6): (S)-3-(2-amino-2-carboxyethyl)benzoic acid
  MOD_RES (11)..(11): (S)-3-amino-1-((pent-4-en-1-yloxy)carbonyl)pyrrolidine-3- carboxylic acid
  MOD_RES (12)..(12): (S)-2-amino-3-(2-(trifluoromethyl)phenyl)propanoic acid
  MOD_RES (13)..(13): (S)-2-amino-3-(benzo[b]thiophen-3-yl)propanoic acid
  MOD_RES (16)..(16): D-threonine
  C-term amino
XDXXDXAAFLXFXQLT

SEQ ID NO: 1868 - protein, 16 aa, Artificial Sequence
  Description of Artificial Sequence: Synthetic peptide
  N-term Acetic Acid
  MOD_RES (1)..(1): (R)-2-allylpyrrolidine-2-carboxylic acid
  MOD_RES (3)..(3): (S)-2-amino-4,4-dimethylpentanoic acid
  MOD_RES (4)..(4): 2-amino-2-(pent-4-en-1-yl)hept-6-enoic acid
  MOD_RES (6)..(6): (S)-3-(2-amino-2-carboxyethyl)benzoic acid
  MOD_RES (11)..(11): (S)-3-amino-1-((pent-4-en-1-yloxy)carbonyl)pyrrolidine-3- carboxylic acid
  MOD_RES (12)..(12): (S)-2-amino-3-(2-(trifluoromethyl)phenyl)propanoic acid
  MOD_RES (13)..(13): (S)-2-amino-3-(benzo[b]thiophen-3-yl)propanoic acid
  MOD_RES (16)..(16): D-glutamine
  C-term amino
XDXXDXAAFLXFXQLQ

SEQ ID NO: 1869 - protein, 16 aa, Artificial Sequence
  Description of Artificial Sequence: Synthetic peptide
  N-term Acetic Acid
  MOD_RES (1)..(1): (R)-2-allylpyrrolidine-2-carboxylic acid
  MOD_RES (3)..(3): (S)-2-amino-4,4-dimethylpentanoic acid
  MOD_RES (4)..(4): 2-amino-2-(pent-4-en-1-yl)hept-6-enoic acid
  MOD_RES (6)..(6): (S)-3-(2-amino-2-carboxyethyl)benzoic acid
  MOD_RES (11)..(11): (S)-3-amino-1-((pent-4-en-1-yloxy)carbonyl)pyrrolidine-3- carboxylic acid
  MOD_RES (12)..(12): (S)-2-amino-3-(2-(trifluoromethyl)phenyl)propanoic acid
  MOD_RES (13)..(13): (S)-2-amino-3-(benzo[b]thiophen-3-yl)propanoic acid
  C-term amino
XDXXDXAAFLXFXQAA

SEQ ID NO: 1870 - protein, 16 aa, Artificial Sequence
  Description of Artificial Sequence: Synthetic peptide
  N-term Acetic Acid
  MOD_RES (1)..(1): (R)-2-allylpyrrolidine-2-carboxylic acid
  MOD_RES (3)..(3): (S)-2-amino-4,4-dimethylpentanoic acid
  MOD_RES (4)..(4): 2-amino-2-(pent-4-en-1-yl)hept-6-enoic acid
  MOD_RES (6)..(6): (S)-3-(2-amino-2-carboxyethyl)benzoic acid
  MOD_RES (11)..(11): (S)-3-amino-1-((pent-4-en-1-yloxy)carbonyl)pyrrolidine-3- carboxylic acid
  MOD_RES (12)..(12): (S)-2-amino-3-(2-(trifluoromethyl)phenyl)propanoic acid
  MOD_RES (13)..(13): (S)-2-amino-3-(benzo[b]thiophen-3-yl)propanoic acid
  C-term amino
XDXXDXAAFLXFXQFA

SEQ ID NO: 1871 - protein, 16 aa, Artificial Sequence
  Description of Artificial Sequence: Synthetic peptide
  N-term Acetic Acid
  MOD_RES (1)..(1): (R)-2-allylpyrrolidine-2-carboxylic acid
  MOD_RES (3)..(3): (S)-2-amino-4,4-dimethylpentanoic acid
  MOD_RES (4)..(4): 2-amino-2-(pent-4-en-1-yl)hept-6-enoic acid
  MOD_RES (6)..(6): (S)-3-(2-amino-2-carboxyethyl)benzoic acid
  MOD_RES (11)..(11): (S)-3-amino-1-((pent-4-en-1-yloxy)carbonyl)pyrrolidine-3- carboxylic acid
  MOD_RES (12)..(12): (S)-2-amino-3-(2-(trifluoromethyl)phenyl)propanoic acid
  MOD_RES (13)..(13): (S)-2-amino-3-(benzo[b]thiophen-3-yl)propanoic acid
  C-term amino
XDXXDXAAFLXFXQVA

SEQ ID NO: 1872 - protein, 14 aa, Artificial Sequence
  Description of Artificial Sequence: Synthetic peptide
  N-term propiolic acid
  MOD_RES (1)..(1): (R)-2-allylpyrrolidine-2-carboxylic acid
  MOD_RES (3)..(3): (S)-2-amino-4,4-dimethylpentanoic acid
  MOD_RES (4)..(4): 2-amino-2-(pent-4-en-1-yl)hept-6-enoic acid
  MOD_RES (11)..(11): (S)-3-amino-1-((pent-4-en-1-yloxy)carbonyl)pyrrolidine-3- carboxylic acid
  MOD_RES (12)..(12): (S)-2-amino-3-(thiophen-3-yl)propanoic acid
  MOD_RES (13)..(13): (S)-2-amino-3-(benzo[b]thiophen-3-yl)propanoic acid
  C-term amino
XDXXDDAAFQXXXH

SEQ ID NO: 1873 - protein, 14 aa, Artificial Sequence
  Description of Artificial Sequence: Synthetic peptide
  N-term propiolic acid
  MOD_RES (1)..(1): (R)-2-allylpyrrolidine-2-carboxylic acid
  MOD_RES (3)..(3): (S)-2-amino-4,4-dimethylpentanoic acid
  MOD_RES (4)..(4): 2-amino-2-(pent-4-en-1-yl)hept-6-enoic acid
  MOD_RES (6)..(6): (S)-3-(2-amino-2-carboxyethyl)benzoic acid
  MOD_RES (11)..(11): (S)-3-amino-1-((pent-4-en-1-yloxy)carbonyl)pyrrolidine-3- carboxylic acid
  MOD_RES (12)..(12): (S)-2-amino-3-(2-chlorophenyl)propanoic acid
  MOD_RES (13)..(13): (S)-2-amino-3-(benzo[b]thiophen-3-yl)propanoic acid
  C-term amino
XDXXDXAAFLXFXA

SEQ ID NO: 1874 - protein, 14 aa, Artificial Sequence
  Description of Artificial Sequence: Synthetic peptide
  MOD_RES (1)..(1): (2R,4S)-4-(2-(3-(allyloxy)phenyl)acetoxy)pyrrolidine-2- carboxylic acid
  MOD_RES (3)..(3): (S)-2-amino-4,4-dimethylpentanoic acid
  MOD_RES (4)..(4): 2-amino-2-(pent-4-en-1-yl)hept-6-enoic acid
  MOD_RES (6)..(6): (S)-2-amino-3-((carboxymethyl)(2,2,2-trifluoroethyl)amino) propanoic acid
  MOD_RES (11)..(11): (S)-3-amino-1-((pent-4-en-1-yloxy)carbonyl)pyrrolidine-3- carboxylic acid
  MOD_RES (12)..(12): (S)-2-amino-3-(thiophen-3-yl)propanoic acid
  MOD_RES (13)..(13): (S)-2-amino-3-(benzo[b]thiophen-3-yl)propanoic acid
  C-term amino
XDXXDXAAFLXXXQ

SEQ ID NO: 1875 - protein, 14 aa, Artificial Sequence
  Description of Artificial Sequence: Synthetic peptide
  MOD_RES (1)..(1): (2-(3-(allyloxy)phenyl)acetyl)-L-proline
  MOD_RES (3)..(3): (S)-2-amino-4,4-dimethylpentanoic acid
  MOD_RES (4)..(4): 2-amino-2-(pent-4-en-1-yl)hept-6-enoic acid
  MOD_RES (6)..(6): (S)-2-amino-3-((carboxymethyl)(2,2,2-trifluoroethyl)amino) propanoic acid
  MOD_RES (11)..(11): (S)-3-amino-1-((pent-4-en-1-yloxy)carbonyl)pyrrolidine-3- carboxylic acid
  MOD_RES (12)..(12): (S)-2-amino-3-(thiophen-3-yl)propanoic acid
  MOD_RES (13)..(13): (S)-2-amino-3-(benzo[b]thiophen-3-yl)propanoic acid
  C-term amino
PDXXDXAAFLXXXQ

SEQ ID NO: 1876 - protein, 14 aa, Artificial Sequence
  Description of Artificial Sequence: Synthetic peptide
  N-term Acetic Acid
  MOD_RES (1)..(1): (2R,4S)-4-(2-(3-(allyloxy)phenyl)acetoxy)pyrrolidine-2- carboxylic acid
  MOD_RES (3)..(3): (S)-2-amino-4,4-dimethylpentanoic acid
  MOD_RES (4)..(4): 2-amino-2-(pent-4-en-1-yl)hept-6-enoic acid
  MOD_RES (6)..(6): (S)-2-amino-3-((carboxymethyl)(2,2,2-trifluoroethyl)amino) propanoic acid
  MOD_RES (11)..(11): (S)-3-amino-1-((pent-4-en-1-yloxy)carbonyl)pyrrolidine-3- carboxylic acid
  MOD_RES (12)..(12): (S)-2-amino-3-(thiophen-3-yl)propanoic acid
  MOD_RES (13)..(13): (S)-2-amino-3-(benzo[b]thiophen-3-yl)propanoic acid
  C-term amino
XDXXDXAAFLXXXQ

SEQ ID NO: 1877 - protein, 14 aa, Artificial Sequence
  Description of Artificial Sequence: Synthetic peptide
  N-term Acetic Acid
  MOD_RES (1)..(1): (R)-2-allylpyrrolidine-2-carboxylic acid
  MOD_RES (3)..(3): (S)-2-amino-4,4-dimethylpentanoic acid
  MOD_RES (4)..(4): 2-amino-2-(pent-4-en-1-yl)hept-6-enoic acid
  MOD_RES (7)..(7): 2-amino-2-methylpropanoic acid
  MOD_RES (11)..(11): (S)-3-amino-1-((pent-4-en-1-yloxy)carbonyl)pyrrolidine-3- carboxylic acid
  MOD_RES (12)..(12): (S)-2-amino-3-(thiophen-3-yl)propanoic acid
  MOD_RES (13)..(13): (S)-2-amino-3-(benzo[b]thiophen-3-yl)propanoic acid
  C-term amino
XDXXNTXAFRXXXQ

SEQ ID NO: 1878 - protein, 14 aa, Artificial Sequence
  Description of Artificial Sequence: Synthetic peptide
  N-term Acetic Acid
  MOD_RES (1)..(1): (R)-2-allylpyrrolidine-2-carboxylic acid
  MOD_RES (3)..(3): (S)-2-amino-4,4-dimethylpentanoic acid
  MOD_RES (4)..(4): 2-amino-2-(pent-4-en-1-yl)hept-6-enoic acid
  MOD_RES (7)..(7): 2-amino-2-methylpropanoic acid
  MOD_RES (11)..(11): (S)-3-amino-1-((pent-4-en-1-yloxy)carbonyl)pyrrolidine-3- carboxylic acid
  MOD_RES (12)..(12): (S)-2-amino-3-(thiophen-3-yl)propanoic acid
  MOD_RES (13)..(13): (S)-2-amino-3-(benzo[b]thiophen-3-yl)propanoic acid
  C-term amino
XDXXNTXAFLXXXQ

SEQ ID NO: 1879 - protein, 14 aa, Artificial Sequence
  Description of Artificial Sequence: Synthetic peptide
  N-term Acetic Acid
  MOD_RES (1)..(1): (R)-2-allylpyrrolidine-2-carboxylic acid
  MOD_RES (3)..(3): (S)-2-amino-4,4-dimethylpentanoic acid
  MOD_RES (4)..(4): 2-amino-2-(pent-4-en-1-yl)hept-6-enoic acid
  MOD_RES (7)..(7): 2-amino-2-methylpropanoic acid
  MOD_RES (11)..(11): (S)-3-amino-1-((pent-4-en-1-yloxy)carbonyl)pyrrolidine-3- carboxylic acid
  MOD_RES (12)..(12): (S)-2-amino-3-(thiophen-3-yl)propanoic acid
  MOD_RES (13)..(13): (S)-2-amino-3-(benzo[b]thiophen-3-yl)propanoic acid
  C-term amino
XDXXNTXAFTXXXQ

SEQ ID NO: 1880 - protein, 14 aa, Artificial Sequence
  Description of Artificial Sequence: Synthetic peptide
  N-term Acetic Acid
  MOD_RES (1)..(1): (R)-2-allylpyrrolidine-2-carboxylic acid
  MOD_RES (3)..(3): (S)-2-amino-4,4-dimethylpentanoic acid
  MOD_RES (4)..(4): 2-amino-2-(pent-4-en-1-yl)hept-6-enoic acid
  MOD_RES (7)..(7): 2-amino-2-methylpropanoic acid
  MOD_RES (11)..(11): (S)-3-amino-1-((pent-4-en-1-yloxy)carbonyl)pyrrolidine-3- carboxylic acid
  MOD_RES (12)..(12): (S)-2-amino-3-(thiophen-3-yl)propanoic acid
  MOD_RES (13)..(13): (S)-2-amino-3-(benzo[b]thiophen-3-yl)propanoic acid
  C-term amino
XDXXNTXAFHXXXQ

SEQ ID NO: 1881 - protein, 14 aa, Artificial Sequence
  Description of Artificial Sequence: Synthetic peptide
  N-term Acetic Acid
  MOD_RES (1)..(1): (R)-2-allylpyrrolidine-2-carboxylic acid
  MOD_RES (3)..(3): (S)-2-amino-4,4-dimethylpentanoic acid
  MOD_RES (4)..(4): 2-amino-2-(pent-4-en-1-yl)hept-6-enoic acid
  MOD_RES (7)..(7): 2-amino-2-methylpropanoic acid
  MOD_RES (11)..(11): (S)-3-amino-1-((pent-4-en-1-yloxy)carbonyl)pyrrolidine-3- carboxylic acid
  MOD_RES (12)..(12): (S)-2-amino-3-(thiophen-3-yl)propanoic acid
  MOD_RES (13)..(13): (S)-2-amino-3-(benzo[b]thiophen-3-yl)propanoic acid
  C-term amino
XDXXNTXAFNXXXA

SEQ ID NO: 1882 - protein, 14 aa, Artificial Sequence
  Description of Artificial Sequence: Synthetic peptide
  N-term Acetic Acid
  MOD_RES (1)..(1): (R)-2-allylpyrrolidine-2-carboxylic acid
  MOD_RES (3)..(3): (S)-2-amino-4,4-dimethylpentanoic acid
  MOD_RES (4)..(4): 2-amino-2-(pent-4-en-1-yl)hept-6-enoic acid
  MOD_RES (7)..(7): 2-amino-2-methylpropanoic acid
  MOD_RES (11)..(11): (S)-3-amino-1-((pent-4-en-1-yloxy)carbonyl)pyrrolidine-3- carboxylic acid
  MOD_RES (12)..(12): (S)-2-amino-3-(thiophen-3-yl)propanoic acid
  MOD_RES (13)..(13): (S)-2-amino-3-(benzo[b]thiophen-3-yl)propanoic acid
  C-term amino
XDXXNTXAFNXXXF

SEQ ID NO: 1883 - protein, 14 aa, Artificial Sequence
  Description of Artificial Sequence: Synthetic peptide
  N-term Acetic Acid
  MOD_RES (1)..(1): (R)-2-allylpyrrolidine-2-carboxylic acid
  MOD_RES (3)..(3): (S)-2-amino-4,4-dimethylpentanoic acid
  MOD_RES (4)..(4): 2-amino-2-(pent-4-en-1-yl)hept-6-enoic acid
  MOD_RES (7)..(7): 2-amino-2-methylpropanoic acid
  MOD_RES (11)..(11): (S)-3-amino-1-((pent-4-en-1-yloxy)carbonyl)pyrrolidine-3- carboxylic acid
  MOD_RES (12)..(12): (S)-2-amino-3-(thiophen-3-yl)propanoic acid
  MOD_RES (13)..(13): (S)-2-amino-3-(benzo[b]thiophen-3-yl)propanoic acid
  C-term amino
XDXXNTXAFNXXXR

SEQ ID NO: 1884 - protein, 14 aa, Artificial Sequence
  Description of Artificial Sequence: Synthetic peptide
  N-term Acetic Acid
  MOD_RES (1)..(1): (R)-2-allylpyrrolidine-2-carboxylic acid
  MOD_RES (3)..(3): (S)-2-amino-4,4-dimethylpentanoic acid
  MOD_RES (4)..(4): 2-amino-2-(pent-4-en-1-yl)hept-6-enoic acid
  MOD_RES (7)..(7): 2-amino-2-methylpropanoic acid
  MOD_RES (11)..(11): (S)-3-amino-1-((pent-4-en-1-yloxy)carbonyl)pyrrolidine-3- carboxylic acid
  MOD_RES (12)..(12): (S)-2-amino-3-(thiophen-3-yl)propanoic acid
  MOD_RES (13)..(13): (S)-2-amino-3-(benzo[b]thiophen-3-yl)propanoic acid
  C-term amino
XDXXNTXAFNXXXH

SEQ ID NO: 1885 - protein, 14 aa, Artificial Sequence
  Description of Artificial Sequence: Synthetic peptide
  N-term Acetic Acid
  MOD_RES (1)..(1): (R)-2-allylpyrrolidine-2-carboxylic acid
  MOD_RES (3)..(3): (S)-2-amino-4,4-dimethylpentanoic acid
  MOD_RES (4)..(4): 2-amino-2-(pent-4-en-1-yl)hept-6-enoic acid
  MOD_RES (7)..(7): 2-amino-2-methylpropanoic acid
  MOD_RES (11)..(11): (S)-3-amino-1-((pent-4-en-1-yloxy)carbonyl)pyrrolidine-3- carboxylic acid
  MOD_RES (12)..(12): (S)-2-amino-3-(thiophen-3-yl)propanoic acid
  MOD_RES (13)..(13): (S)-2-amino-3-(benzo[b]thiophen-3-yl)propanoic acid
  C-term amino
XDXXNTXAFNXXXN

SEQ ID NO: 1886 - protein, 14 aa, Artificial Sequence
  Description of Artificial Sequence: Synthetic peptide
  N-term Acetic Acid
  MOD_RES (1)..(1): (R)-2-allylpyrrolidine-2-carboxylic acid
  MOD_RES (3)..(3): (S)-2-amino-4,4-dimethylpentanoic acid
  MOD_RES (4)..(4): 2-amino-2-(pent-4-en-1-yl)hept-6-enoic acid
  MOD_RES (7)..(7): 2-amino-2-methylpropanoic acid
  MOD_RES (11)..(11): (S)-3-amino-1-((pent-4-en-1-yloxy)carbonyl)pyrrolidine-3- carboxylic acid
  MOD_RES (12)..(12): (S)-2-amino-3-(thiophen-3-yl)propanoic acid
  MOD_RES (13)..(13): (S)-2-amino-3-(benzo[b]thiophen-3-yl)propanoic acid
  C-term amino
XDXXNTXAFNXXXT

SEQ ID NO: 1887 - protein, 14 aa, Artificial Sequence
  Description of Artificial Sequence: Synthetic peptide
  N-term Acetic Acid
  MOD_RES (1)..(1): (R)-2-allylpyrrolidine-2-carboxylic acid
  MOD_RES (3)..(3): (S)-2-amino-4,4-dimethylpentanoic acid
  MOD_RES (4)..(4): 2-amino-2-(pent-4-en-1-yl)hept-6-enoic acid
  MOD_RES (7)..(7): 2-amino-2-methylpropanoic acid
  MOD_RES (11)..(11): (S)-3-amino-1-((pent-4-en-1-yloxy)carbonyl)pyrrolidine-3- carboxylic acid
  MOD_RES (12)..(12): (S)-2-amino-3-(thiophen-3-yl)propanoic acid
  MOD_RES (13)..(13): (S)-2-amino-3-(3,4-dichlorophenyl)propanoic acid
  C-term amino
XDXXNTXAFNXXFQ

SEQ ID NO: 1888 - protein, 14 aa, Artificial Sequence
  Description of Artificial Sequence: Synthetic peptide
  N-term Acetic Acid
  MOD_RES (1)..(1): (R)-2-allylpyrrolidine-2-carboxylic acid
  MOD_RES (3)..(3): (S)-2-amino-3-cyclohexylpropanoic acid
  MOD_RES (4)..(4): 2-amino-2-(pent-4-en-1-yl)hept-6-enoic acid
  MOD_RES (11)..(11): (S)-3-amino-1-((pent-4-en-1-yloxy)carbonyl)pyrrolidine-3- carboxylic acid
  MOD_RES (13)..(13): (S)-2-amino-3-(benzo[b]thiophen-3-yl)propanoic acid
  C-term amino
XNXXDQAAFLXFXK

SEQ ID NO: 1889 - protein, 14 aa, Artificial Sequence
  Description of Artificial Sequence: Synthetic peptide
  N-term Acetic Acid
  MOD_RES (1)..(1): (R)-2-allylpyrrolidine-2-carboxylic acid
  MOD_RES (3)..(3): (S)-2-amino-3-cyclohexylpropanoic acid
  MOD_RES (4)..(4): 2-amino-2-(pent-4-en-1-yl)hept-6-enoic acid
  MOD_RES (7)..(7): L-homoserine
  MOD_RES (11)..(11): (S)-3-amino-1-((pent-4-en-1-yloxy)carbonyl)pyrrolidine-3- carboxylic acid
  MOD_RES (13)..(13): (S)-2-amino-3-(benzo[b]thiophen-3-yl)propanoic acid
  C-term amino
XNXXDQSAFLXFXK

SEQ ID NO: 1890 - protein, 14 aa, Artificial Sequence
  Description of Artificial Sequence: Synthetic peptide
  N-term Acetic Acid
  MOD_RES (1)..(1): (R)-2-allylpyrrolidine-2-carboxylic acid
  MOD_RES (3)..(3): (S)-2-amino-3-cyclohexylpropanoic acid
  MOD_RES (4)..(4): 2-amino-2-(pent-4-en-1-yl)hept-6-enoic acid
  MOD_RES (11)..(11): (S)-3-amino-1-((pent-4-en-1-yloxy)carbonyl)pyrrolidine-3- carboxylic acid
  MOD_RES (13)..(13): (S)-2-amino-3-(benzo[b]thiophen-3-yl)propanoic acid
  C-term amino
XNXXDQNAFLXFXK

SEQ ID NO: 1891 - protein, 14 aa, Artificial Sequence
  Description of Artificial Sequence: Synthetic peptide
  N-term Acetic Acid
  MOD_RES (1)..(1): (R)-2-allylpyrrolidine-2-carboxylic acid
  MOD_RES (3)..(3): (S)-2-amino-3-cyclohexylpropanoic acid
  MOD_RES (4)..(4): 2-amino-2-(pent-4-en-1-yl)hept-6-enoic acid
  MOD_RES (11)..(11): (S)-3-amino-1-((pent-4-en-1-yloxy)carbonyl)pyrrolidine-3- carboxylic acid
  MOD_RES (13)..(13): (S)-2-amino-3-(benzo[b]thiophen-3-yl)propanoic acid
  C-term amino
XNXXDQQAFLXFXK

SEQ ID NO: 1892 - protein, 14 aa, Artificial Sequence
  Description of Artificial Sequence: Synthetic peptide
  N-term Acetic Acid
  MOD_RES (1)..(1): (R)-2-allylpyrrolidine-2-carboxylic acid
  MOD_RES (3)..(3): (S)-2-amino-3-cyclohexylpropanoic acid
  MOD_RES (4)..(4): 2-amino-2-(pent-4-en-1-yl)hept-6-enoic acid
  MOD_RES (11)..(11): (S)-3-amino-1-((pent-4-en-1-yloxy)carbonyl)pyrrolidine-3- carboxylic acid
  MOD_RES (13)..(13): (S)-2-amino-3-(benzo[b]thiophen-3-yl)propanoic acid
  C-term amino
XNXXDQSAFLXFXK

SEQ ID NO: 1893 - protein, 14 aa, Artificial Sequence
  Description of Artificial Sequence: Synthetic peptide
  N-term Acetic Acid
  MOD_RES (1)..(1): (R)-2-allylpyrrolidine-2-carboxylic acid
  MOD_RES (3)..(3): (S)-2-amino-3-cyclohexylpropanoic acid
  MOD_RES (4)..(4): 2-amino-2-(pent-4-en-1-yl)hept-6-enoic acid
  MOD_RES (11)..(11): (S)-3-amino-1-((pent-4-en-1-yloxy)carbonyl)pyrrolidine-3- carboxylic acid
  MOD_RES (13)..(13): (S)-2-amino-3-(benzo[b]thiophen-3-yl)propanoic acid
  C-term amino
XNXXDQTAFLXFXK

SEQ ID NO: 1894 - protein, 14 aa, Artificial Sequence
  Description of Artificial Sequence: Synthetic peptide
  N-term Acetic Acid
  MOD_RES (1)..(1): (R)-2-allylpyrrolidine-2-carboxylic acid
  MOD_RES (3)..(3): (S)-2-amino-3-cyclohexylpropanoic acid
  MOD_RES (4)..(4): 2-amino-2-(pent-4-en-1-yl)hept-6-enoic acid
  MOD_RES (7)..(7): 2-amino-2-methylpropanoic acid
  MOD_RES (11)..(11): (S)-3-amino-1-((pent-4-en-1-yloxy)carbonyl)pyrrolidine-3- carboxylic acid
  MOD_RES (13)..(13): (S)-2-amino-3-(benzo[b]thiophen-3-yl)propanoic acid
  C-term amino
XNXXDQXAFLXFXK

SEQ ID NO: 1895 - protein, 14 aa, Artificial Sequence
  Description of Artificial Sequence: Synthetic peptide
  N-term Acetic Acid
  MOD_RES (1)..(1): (R)-2-allylpyrrolidine-2-carboxylic acid
  MOD_RES (3)..(3): (S)-2-amino-3-cyclohexylpropanoic acid
  MOD_RES (4)..(4): 2-amino-2-(pent-4-en-1-yl)hept-6-enoic acid
  MOD_RES (7)..(7): (S)-2-amino-4-morpholino-4-oxobutanoic acid
  MOD_RES (11)..(11): (S)-3-amino-1-((pent-4-en-1-yloxy)carbonyl)pyrrolidine-3- carboxylic acid
  MOD_RES (13)..(13): (S)-2-amino-3-(benzo[b]thiophen-3-yl)propanoic acid
  C-term amino
XNXXDQXAFLXFXK

SEQ ID NO: 1896 - protein, 14 aa, Artificial Sequence
  Description of Artificial Sequence: Synthetic peptide
  N-term Acetic Acid
  MOD_RES (1)..(1): (R)-2-allylpyrrolidine-2-carboxylic acid
  MOD_RES (3)..(3): (S)-2-amino-3-cyclohexylpropanoic acid
  MOD_RES (4)..(4): 2-amino-2-(pent-4-en-1-yl)hept-6-enoic acid
  MOD_RES (7)..(7): N6-isopropyl-L-lysine
  MOD_RES (11)..(11): (S)-3-amino-1-((pent-4-en-1-yloxy)carbonyl)pyrrolidine-3- carboxylic acid
  MOD_RES (13)..(13): (S)-2-amino-3-(benzo[b]thiophen-3-yl)propanoic acid
  MOD_RES (14)..(14): (S)-2-amino-4-morpholino-4-oxobutanoic acid
  C-term amino
XNXXDQKAFLXFXX

SEQ ID NO: 1897 - protein, 14 aa, Artificial Sequence
  Description of Artificial Sequence: Synthetic peptide
  N-term Acetic Acid
  MOD_RES (1)..(1): (R)-2-allylpyrrolidine-2-carboxylic acid
  MOD_RES (3)..(3): (S)-2-amino-3-cyclohexylpropanoic acid
  MOD_RES (4)..(4): 2-amino-2-(pent-4-en-1-yl)hept-6-enoic acid
  MOD_RES (7)..(7): (S)-2-amino-5-morpholinopentanoic acid
  MOD_RES (11)..(11): (S)-3-amino-1-((pent-4-en-1-yloxy)carbonyl)pyrrolidine-3- carboxylic acid
  MOD_RES (13)..(13): (S)-2-amino-3-(benzo[b]thiophen-3-yl)propanoic acid
  C-term amino
XNXXDQXAFLXFXK

SEQ ID NO: 1898 - protein, 14 aa, Artificial Sequence
  Description of Artificial Sequence: Synthetic peptide
  N-term Acetic Acid
  MOD_RES (1)..(1): (R)-2-allylpyrrolidine-2-carboxylic acid
  MOD_RES (3)..(3): (S)-2-amino-3-cyclohexylpropanoic acid
  MOD_RES (4)..(4): 2-amino-2-(pent-4-en-1-yl)hept-6-enoic acid
  MOD_RES (7)..(7): N6-isopropyl-L-lysine
  MOD_RES (11)..(11): (S)-3-amino-1-((pent-4-en-1-yloxy)carbonyl)pyrrolidine-3- carboxylic acid
  MOD_RES (13)..(13): (S)-2-amino-3-(benzo[b]thiophen-3-yl)propanoic acid
  MOD_RES (14)..(14): (S)-2-amino-5-morpholinopentanoic acid
  C-term amino
XNXXDQKAFLXFXX

SEQ ID NO: 1899 - protein, 14 aa, Artificial Sequence
  Description of Artificial Sequence: Synthetic peptide
  N-term Acetic Acid
  MOD_RES (1)..(1): (R)-2-allylpyrrolidine-2-carboxylic acid
  MOD_RES (3)..(3): (S)-2-amino-3-cyclohexylpropanoic acid
  MOD_RES (4)..(4): 2-amino-2-(pent-4-en-1-yl)hept-6-enoic acid
  MOD_RES (7)..(7): N6-isopropyl-L-lysine
  MOD_RES (11)..(11): (S)-3-amino-1-((pent-4-en-1-yloxy)carbonyl)pyrrolidine-3- carboxylic acid
  MOD_RES (13)..(13): (S)-2-amino-3-(benzo[b]thiophen-3-yl)propanoic acid
  C-term amino
XDXXDQKAFLXFXK

SEQ ID NO: 1900 - protein, 14 aa, Artificial Sequence
  Description of Artificial Sequence: Synthetic peptide
  N-term Acetic Acid
  MOD_RES (1)..(1): (R)-2-allylpyrrolidine-2-carboxylic acid
  MOD_RES (3)..(3): (S)-2-amino-4,4-dimethylpentanoic acid
  MOD_RES (4)..(4): 2-amino-2-(pent-4-en-1-yl)hept-6-enoic acid
  MOD_RES (6)..(6): (S)-3-(2-amino-2-carboxyethyl)-5-isopropylbenzoic acid
  MOD_RES (11)..(11): (S)-3-amino-1-((pent-4-en-1-yloxy)carbonyl)pyrrolidine-3- carboxylic acid
  MOD_RES (12)..(12): (S)-2-amino-3-(2-(trifluoromethyl)phenyl)propanoic acid
  MOD_RES (13)..(13): (S)-2-amino-3-(benzo[b]thiophen-3-yl)propanoic acid
  C-term amino
XDXXDXAAFLXFXQ

SEQ ID NO: 1901 - protein, 14 aa, Artificial Sequence
  Description of Artificial Sequence: Synthetic peptide
  N-term Acetic Acid
  MOD_RES (1)..(1): (R)-2-allylpyrrolidine-2-carboxylic acid
  MOD_RES (3)..(3): (S)-2-amino-4,4-dimethylpentanoic acid
  MOD_RES (4)..(4): 2-amino-2-(pent-4-en-1-yl)hept-6-enoic acid
  MOD_RES (6)..(6): (S)-3-(2-amino-2-carboxyethyl)-5-isopropylbenzoic acid
  MOD_RES (11)..(11): (S)-3-amino-1-((pent-4-en-1-yloxy)carbonyl)pyrrolidine-3- carboxylic acid
  MOD_RES (12)..(12): (S)-2-amino-3-(2-(trifluoromethyl)phenyl)propanoic acid
  MOD_RES (13)..(13): (S)-2-amino-3-(benzo[b]thiophen-3-yl)propanoic acid
  C-term amino
XDXXDXQAFLXFXA

SEQ ID NO: 1902 - protein, 15 aa, Artificial Sequence
  Description of Artificial Sequence: Synthetic peptide
  N-term Acetic Acid
  MOD_RES (1)..(1): (R)-2-allylpyrrolidine-2-carboxylic acid
  MOD_RES (3)..(3): (S)-2-amino-4,4-dimethylpentanoic acid
  MOD_RES (4)..(4): 2-amino-2-(pent-4-en-1-yl)hept-6-enoic acid
  MOD_RES (6)..(6): (S)-3-(2-amino-2-carboxyethyl)benzoic acid
  MOD_RES (11)..(11): (S)-3-amino-1-((pent-4-en-1-yloxy)carbonyl)pyrrolidine-3- carboxylic acid
  MOD_RES (12)..(12): (S)-2-amino-3-(2-(trifluoromethyl)phenyl)propanoic acid
  MOD_RES (13)..(13): (S)-2-amino-3-(benzo[b]thiophen-3-yl)propanoic acid
  MOD_RES (15)..(15): (S)-2-amino-6-(4-propyl-1H-1,2,3-triazol-1-yl)hexanoic acid
  C-term amino
XDXXDXAAFLXFXSX

SEQ ID NO: 1903 - protein, 14 aa, Artificial Sequence
  Description of Artificial Sequence: Synthetic peptide
  N-term Acetic Acid
  MOD_RES (1)..(1): (R)-2-allylpyrrolidine-2-carboxylic acid
  MOD_RES (2)..(2): L-homoserine
  MOD_RES (3)..(3): (S)-2-amino-4,4-dimethylpentanoic acid
  MOD_RES (4)..(4): 2-amino-2-(pent-4-en-1-yl)hept-6-enoic acid
  MOD_RES (5)..(5): L-homoserine
  MOD_RES (9)..(9): (S)-2-amino-3-(4-bromophenyl)propanoic acid
  MOD_RES (11)..(11): (S)-3-amino-1-((pent-4-en-1-yloxy)carbonyl)pyrrolidine-3- carboxylic acid
  MOD_RES (13)..(13): (S)-2-amino-3-(benzo[b]thiophen-3-yl)propanoic acid
  C-term amino
XSXXSEAAFLXFXN

SEQ ID NO: 1904 - protein, 14 aa, Artificial Sequence
  Description of Artificial Sequence: Synthetic peptide
  N-term Acetic Acid
  MOD_RES (1)..(1): (R)-2-allylpyrrolidine-2-carboxylic acid
  MOD_RES (3)..(3): (S)-2-amino-4,4-dimethylpentanoic acid
  MOD_RES (4)..(4): 2-amino-2-(pent-4-en-1-yl)hept-6-enoic acid
  MOD_RES (11)..(11): (S)-3-amino-1-((pent-4-en-1-yloxy)carbonyl)pyrrolidine-3- carboxylic acid
  MOD_RES (13)..(13): (S)-2-amino-3-(benzo[b]thiophen-3-yl)propanoic acid
  C-term amino
XNXXNEQAFLXFXQ

SEQ ID NO: 1905 - protein, 14 aa, Artificial Sequence
  Description of Artificial Sequence: Synthetic peptide
  N-term Acetic Acid
  MOD_RES (1)..(1): (R)-2-allylpyrrolidine-2-carboxylic acid
  MOD_RES (3)..(3): (S)-2-amino-4,4-dimethylpentanoic acid
  MOD_RES (4)..(4): 2-amino-2-(pent-4-en-1-yl)hept-6-enoic acid
  MOD_RES (11)..(11): (S)-2-amino-2-methyldec-9-enoic acid
  MOD_RES (13)..(13): (S)-2-amino-3-(benzo[b]thiophen-3-yl)propanoic acid
  C-term amino
XNXXNEQAFLXFXQ

SEQ ID NO: 1906 - protein, 14 aa, Artificial Sequence
  Description of Artificial Sequence: Synthetic peptide
  N-term Acetic Acid
  MOD_RES (1)..(1): (R)-2-allylpyrrolidine-2-carboxylic acid
  MOD_RES (2)..(2): L-homoserine
  MOD_RES (3)..(3): (S)-2-amino-4,4-dimethylpentanoic acid
  MOD_RES (4)..(4): 2-amino-2-(pent-4-en-1-yl)hept-6-enoic acid
  MOD_RES (11)..(11): (S)-3-amino-1-((pent-4-en-1-yloxy)carbonyl)pyrrolidine-3- carboxylic acid
  MOD_RES (13)..(13): (S)-2-amino-3-(benzo[b]thiophen-3-yl)propanoic acid
  C-term amino
XSXXNEAAFLXFXN

SEQ ID NO: 1907 - protein, 14 aa, Artificial Sequence
  Description of Artificial Sequence: Synthetic peptide
  N-term Acetic Acid
  MOD_RES (1)..(1): (R)-2-allylpyrrolidine-2-carboxylic acid
  MOD_RES (3)..(3): (S)-2-amino-4,4-dimethylpentanoic acid
  MOD_RES (4)..(4): 2-amino-2-(pent-4-en-1-yl)hept-6-enoic acid
  MOD_RES (11)..(11): (S)-3-amino-1-((pent-4-en-1-yloxy)carbonyl)pyrrolidine-3- carboxylic acid
  MOD_RES (13)..(13): (S)-2-amino-3-(benzo[b]thiophen-3-yl)propanoic acid
  C-term amino
XNXXNESAFLXFXQ

SEQ ID NO: 1908 - protein, 14 aa, Artificial Sequence
  Description of Artificial Sequence: Synthetic peptide
  N-term Acetic Acid
  MOD_RES (1)..(1): (R)-2-allylpyrrolidine-2-carboxylic acid
  MOD_RES (2)..(2): L-homoserine
  MOD_RES (3)..(3): (S)-2-amino-4,4-dimethylpentanoic acid
  MOD_RES (4)..(4): 2-amino-2-(pent-4-en-1-yl)hept-6-enoic acid
  MOD_RES (11)..(11): (S)-3-amino-1-((pent-4-en-1-yloxy)carbonyl)pyrrolidine-3- carboxylic acid
  MOD_RES (13)..(13): (S)-2-amino-3-(benzo[b]thiophen-3-yl)propanoic acid
  C-term amino
XSXXDHAAFTXFXQ

SEQ ID NO: 1909 - protein, 14 aa, Artificial Sequence
  Description of Artificial Sequence: Synthetic peptide
  N-term Acetic Acid
  MOD_RES (1)..(1): (R)-2-allylpyrrolidine-2-carboxylic acid
  MOD_RES (2)..(2): L-homoserine
  MOD_RES (3)..(3): (S)-2-amino-4,4-dimethylpentanoic acid
  MOD_RES (4)..(4): 2-amino-2-(pent-4-en-1-yl)hept-6-enoic acid
  MOD_RES (11)..(11): (S)-3-amino-1-((pent-4-en-1-yloxy)carbonyl)pyrrolidine-3- carboxylic acid
  MOD_RES (13)..(13): (S)-2-amino-3-(benzo[b]thiophen-3-yl)propanoic acid
  C-term amino
XSXXDQAAFHXFXQ

SEQ ID NO: 1910 - protein, 14 aa, Artificial Sequence
  Description of Artificial Sequence: Synthetic peptide
  N-term Acetic Acid
  MOD_RES (1)..(1): (R)-2-allylpyrrolidine-2-carboxylic acid
  MOD_RES (3)..(3): (S)-2-amino-4,4-dimethylpentanoic acid
  MOD_RES (4)..(4): 2-amino-2-(pent-4-en-1-yl)hept-6-enoic acid
  MOD_RES (11)..(11): (S)-3-amino-1-((pent-4-en-1-yloxy)carbonyl)pyrrolidine-3- carboxylic acid
  MOD_RES (13)..(13): (S)-2-amino-3-(benzo[b]thiophen-3-yl)propanoic acid
  C-term amino
XNXXDQAAFHXFXQ

SEQ ID NO: 1911 - protein, 14 aa, Artificial Sequence
  Description of Artificial Sequence: Synthetic peptide
  N-term Acetic Acid
  MOD_RES (1)..(1): (R)-2-allylpyrrolidine-2-carboxylic acid
  MOD_RES (2)..(2): L-homoserine
  MOD_RES (3)..(3): (S)-2-amino-4,4-dimethylpentanoic acid
  MOD_RES (4)..(4): 2-amino-2-(pent-4-en-1-yl)hept-6-enoic acid
  MOD_RES (11)..(11): (S)-3-amino-1-((pent-4-en-1-yloxy)carbonyl)pyrrolidine-3- carboxylic acid
  MOD_RES (13)..(13): (S)-2-amino-3-(benzo[b]thiophen-3-yl)propanoic acid
  C-term amino
XSXXDRAAFTXFXQ

SEQ ID NO: 1912 - protein, 14 aa, Artificial Sequence
  Description of Artificial Sequence: Synthetic peptide
  N-term Acetic Acid
  MOD_RES (1)..(1): (R)-2-allylpyrrolidine-2-carboxylic acid
  MOD_RES (3)..(3): (S)-2-amino-4,4-dimethylpentanoic acid
  MOD_RES (4)..(4): 2-amino-2-(pent-4-en-1-yl)hept-6-enoic acid
  MOD_RES (11)..(11): (S)-3-amino-1-((pent-4-en-1-yloxy)carbonyl)pyrrolidine-3- carboxylic acid
  MOD_RES (13)..(13): (S)-2-amino-3-(benzo[b]thiophen-3-yl)propanoic acid
  C-term amino
XNXXDHAAFLXFXQ

SEQ ID NO: 1913 - protein, 14 aa, Artificial Sequence
  Description of Artificial Sequence: Synthetic peptide
  N-term Acetic Acid
  MOD_RES (1)..(1): (R)-2-allylpyrrolidine-2-carboxylic acid
  MOD_RES (2)..(2): L-homoserine
  MOD_RES (3)..(3): (S)-2-amino-4,4-dimethylpentanoic acid
  MOD_RES (4)..(4): 2-amino-2-(pent-4-en-1-yl)hept-6-enoic acid
  MOD_RES (11)..(11): (S)-3-amino-1-((pent-4-en-1-yloxy)carbonyl)pyrrolidine-3- carboxylic acid
  MOD_RES (13)..(13): (S)-2-amino-3-(benzo[b]thiophen-3-yl)propanoic acid
  C-term amino
XSXXDQAAFLXFXQ

SEQ ID NO: 1914 - protein, 15 aa, Artificial Sequence
  Description of Artificial Sequence: Synthetic peptide
  N-term Acetic Acid
  MOD_RES (1)..(1): (R)-2-allylpyrrolidine-2-carboxylic acid
  MOD_RES (3)..(3): (S)-2-amino-4,4-dimethylpentanoic acid
  MOD_RES (4)..(4): 2-amino-2-(pent-4-en-1-yl)hept-6-enoic acid
  MOD_RES (6)..(6): (S)-3-(2-amino-2-carboxyethyl)benzoic acid
  MOD_RES (11)..(11): (S)-3-amino-1-((pent-4-en-1-yloxy)carbonyl)pyrrolidine-3- carboxylic acid
  MOD_RES (12)..(12): (S)-2-amino-3-(2-(trifluoromethyl)phenyl)propanoic acid
  MOD_RES (13)..(13): (S)-2-amino-3-(benzo[b]thiophen-3-yl)propanoic acid
  MOD_RES (15)..(15): (R)-2-amino-6-(4-propyl-1H-1,2,3-triazol-1-yl)hexanoic acid
  C-term amino
XDXXDXAAFLXFXSX

SEQ ID NO: 1915 - protein, 14 aa, Artificial Sequence
  Description of Artificial Sequence: Synthetic peptide
  N-term Acetic Acid
  MOD_RES (1)..(1): (R)-2-allylpyrrolidine-2-carboxylic acid
  MOD_RES (3)..(3): (S)-2-amino-4,4-dimethylpentanoic acid
  MOD_RES (4)..(4): 2-amino-2-(pent-4-en-1-yl)hept-6-enoic acid
  MOD_RES (6)..(6): (S)-1-(1-(2-amino-2-carboxyethyl)-1H-1,2,3-triazol-4-yl) cyclopropane-1-carboxylic acid
  MOD_RES (11)..(11): (S)-3-amino-1-((pent-4-en-1-yloxy)carbonyl)pyrrolidine-3- carboxylic acid
  MOD_RES (12)..(12): (S)-2-amino-3-(thiophen-3-yl)propanoic acid
  MOD_RES (13)..(13): (S)-2-amino-3-(benzo[b]thiophen-3-yl)propanoic acid
  C-term amino
XDXXDXAAFLXXXQ

SEQ ID NO: 1916 - protein, 14 aa, Artificial Sequence
  Description of Artificial Sequence: Synthetic peptide
  N-term Acetic Acid
  MOD_RES (1)..(1): (R)-2-allylpyrrolidine-2-carboxylic acid
  MOD_RES (3)..(3): (S)-2-amino-3-cyclohexylpropanoic acid
  MOD_RES (4)..(4): 2-amino-2-(pent-4-en-1-yl)hept-6-enoic acid
  MOD_RES (7)..(7): N6-isopropyl-L-lysine
  MOD_RES (11)..(11): (S)-3-amino-1-((pent-4-en-1-yloxy)carbonyl)pyrrolidine-3- carboxylic acid
  MOD_RES (12)..(12): (S)-2-amino-3-(thiophen-3-yl)propanoic acid
  MOD_RES (13)..(13): (S)-2-amino-3-(benzo[b]thiophen-3-yl)propanoic acid
  C-term amino
XNXXDQKAFLXXXQ

SEQ ID NO: 1917 - protein, 14 aa, Artificial Sequence
  Description of Artificial Sequence: Synthetic peptide
  N-term Acetic Acid
  MOD_RES (1)..(1): (R)-2-allylpyrrolidine-2-carboxylic acid
  MOD_RES (3)..(3): (S)-2-amino-3-cyclohexylpropanoic acid
  MOD_RES (4)..(4): 2-amino-2-(pent-4-en-1-yl)hept-6-enoic acid
  MOD_RES (7)..(7): L-homoserine
  MOD_RES (11)..(11): (S)-3-amino-1-((pent-4-en-1-yloxy)carbonyl)pyrrolidine-3- carboxylic acid
  MOD_RES (13)..(13): (S)-2-amino-3-(benzo[b]thiophen-3-yl)propanoic acid
  C-term amino
XNXXDTSAFLXFXQ

SEQ ID NO: 1918 - protein, 14 aa, Artificial Sequence
  Description of Artificial Sequence: Synthetic peptide
  N-term Acetic Acid
  MOD_RES (1)..(1): (R)-2-allylpyrrolidine-2-carboxylic acid
  MOD_RES (3)..(3): (S)-2-amino-3-cyclohexylpropanoic acid
  MOD_RES (4)..(4): 2-amino-2-(pent-4-en-1-yl)hept-6-enoic acid
  MOD_RES (7)..(7): N6-isopropyl-L-lysine
  MOD_RES (11)..(11): (S)-3-amino-1-((pent-4-en-1-yloxy)carbonyl)pyrrolidine-3- carboxylic acid
  MOD_RES (13)..(13): (S)-2-amino-3-(benzo[b]thiophen-3-yl)propanoic acid
  C-term amino
XNXXDTKAFLXFXQ

SEQ ID NO: 1919 - protein, 14 aa, Artificial Sequence
  Description of Artificial Sequence: Synthetic peptide
  N-term Acetic Acid
  MOD_RES (1)..(1): (R)-2-allylpyrrolidine-2-carboxylic acid
  MOD_RES (3)..(3): (S)-2-amino-3-cyclohexylpropanoic acid
  MOD_RES (4)..(4): 2-amino-2-(pent-4-en-1-yl)hept-6-enoic acid
  MOD_RES (7)..(7): L-homoserine
  MOD_RES (11)..(11): (S)-3-amino-1-((pent-4-en-1-yloxy)carbonyl)pyrrolidine-3- carboxylic acid
  MOD_RES (13)..(13): (S)-2-amino-3-(benzo[b]thiophen-3-yl)propanoic acid
  C-term amino
XNXXDTSAFLXFXK

SEQ ID NO: 1920 - protein, 14 aa, Artificial Sequence
  Description of Artificial Sequence: Synthetic peptide
  N-term Acetic Acid
  MOD_RES (1)..(1): (R)-2-allylpyrrolidine-2-carboxylic acid
  MOD_RES (3)..(3): (S)-2-amino-3-cyclohexylpropanoic acid
  MOD_RES (4)..(4): 2-amino-2-(pent-4-en-1-yl)hept-6-enoic acid
  MOD_RES (7)..(7): N6-isopropyl-L-lysine
  MOD_RES (11)..(11): (S)-3-amino-1-((pent-4-en-1-yloxy)carbonyl)pyrrolidine-3- carboxylic acid
  MOD_RES (13)..(13): (S)-2-amino-3-(benzo[b]thiophen-3-yl)propanoic acid
  C-term amino
XNXXDTKAFLXFXK

SEQ ID NO: 1921 - protein, 14 aa, Artificial Sequence
  Description of Artificial Sequence: Synthetic peptide
  N-term Acetic Acid
  MOD_RES (1)..(1): (R)-2-allylpyrrolidine-2-carboxylic acid
  MOD_RES (3)..(3): (S)-2-amino-3-cyclohexylpropanoic acid
  MOD_RES (4)..(4): 2-amino-2-(pent-4-en-1-yl)hept-6-enoic acid
  MOD_RES (7)..(7): L-homoserine
  MOD_RES (11)..(11): (S)-3-amino-1-((pent-4-en-1-yloxy)carbonyl)pyrrolidine-3- carboxylic acid
  MOD_RES (12)..(12): (S)-2-amino-3-(thiophen-3-yl)propanoic acid
  MOD_RES (13)..(13): (S)-2-amino-3-(benzo[b]thiophen-3-yl)propanoic acid
  C-term amino
XNXXDQSAFLXXXQ

SEQ ID NO: 1922 - protein, 14 aa, Artificial Sequence
  Description of Artificial Sequence: Synthetic peptide
  N-term Acetic Acid
  MOD_RES (1)..(1): (R)-2-allylpyrrolidine-2-carboxylic acid
  MOD_RES (3)..(3): (S)-2-amino-4,4-dimethylpentanoic acid
  MOD_RES (4)..(4): 2-amino-2-(pent-4-en-1-yl)hept-6-enoic acid
  MOD_RES (6)..(6): (S)-3-(2-amino-2-carboxyethyl)benzoic acid
  MOD_RES (11)..(11): (S)-3-amino-1-((pent-4-en-1-yloxy)carbonyl)pyrrolidine-3- carboxylic acid
  MOD_RES (12)..(12): (S)-2-amino-3-(2-(trifluoromethyl)phenyl)propanoic acid
  MOD_RES (13)..(13): (2S,3S)-2-amino-3-(benzo[b]thiophen-3-yl)butanoic acid
  C-term amino
XDXXDXAAFLXFXQ

SEQ ID NO: 1923 - protein, 14 aa, Artificial Sequence
  Description of Artificial Sequence: Synthetic peptide
  N-term Acetic Acid
  MOD_RES (1)..(1): (R)-2-allylpyrrolidine-2-carboxylic acid
  MOD_RES (3)..(3): (S)-2-amino-4,4-dimethylpentanoic acid
  MOD_RES (4)..(4): 2-amino-2-(pent-4-en-1-yl)hept-6-enoic acid
  MOD_RES (6)..(6): (S)-3-(2-amino-2-carboxyethyl)benzoic acid
  MOD_RES (11)..(11): (S)-3-amino-1-((pent-4-en-1-yloxy)carbonyl)pyrrolidine-3- carboxylic acid
  MOD_RES (12)..(12): (S)-2-amino-3-(2-(trifluoromethyl)phenyl)propanoic acid
  MOD_RES (13)..(13): (2S,3S)-2-amino-3-(benzo[b]thiophen-3-yl)butanoic acid
  C-term amino
XDXXDXQAFLXFXA

SEQ ID NO: 1924 - protein, 14 aa, Artificial Sequence
  Description of Artificial Sequence: Synthetic peptide
  N-term Acetic Acid
  MOD_RES (1)..(1): (R)-2-allylpyrrolidine-2-carboxylic acid
  MOD_RES (3)..(3): (S)-2-amino-4,4-dimethylpentanoic acid
  MOD_RES (4)..(4): 2-amino-2-(pent-4-en-1-yl)hept-6-enoic acid
  MOD_RES (6)..(6): (S)-3-(2-amino-2-carboxyethyl)benzoic acid
  MOD_RES (11)..(11): (S)-3-amino-1-((pent-4-en-1-yloxy)carbonyl)pyrrolidine-3- carboxylic acid
  MOD_RES (12)..(12): (S)-2-amino-3-(2-(trifluoromethyl)phenyl)propanoic acid
  MOD_RES (13)..(13): (2S,3R)-2-amino-3-(benzo[b]thiophen-3-yl)butanoic acid
  C-term amino
XDXXDXAAFLXFXQ

SEQ ID NO: 1925 - protein, 14 aa, Artificial Sequence
  Description of Artificial Sequence: Synthetic peptide
  N-term Acetic Acid
  MOD_RES (1)..(1): (R)-2-allylpyrrolidine-2-carboxylic acid
  MOD_RES (3)..(3): (S)-2-amino-4,4-dimethylpentanoic acid
  MOD_RES (4)..(4): 2-amino-2-(pent-4-en-1-yl)hept-6-enoic acid
  MOD_RES (6)..(6): (S)-3-(2-amino-2-carboxyethyl)benzoic acid
  MOD_RES (11)..(11): (S)-3-amino-1-((pent-4-en-1-yloxy)carbonyl)pyrrolidine-3- carboxylic acid
  MOD_RES (12)..(12): (S)-2-amino-3-(2-(trifluoromethyl)phenyl)propanoic acid
  MOD_RES (13)..(13): (2S,3R)-2-amino-3-(benzo[b]thiophen-3-yl)butanoic acid
  C-term amino
XDXXDXQAFLXFXA

SEQ ID NO: 1926 - protein, 14 aa, Artificial Sequence
  Description of Artificial Sequence: Synthetic peptide
  N-term Acetic Acid
  MOD_RES (1)..(1): (R)-2-allylpyrrolidine-2-carboxylic acid
  MOD_RES (3)..(3): (S)-2-amino-4,4-dimethylpentanoic acid
  MOD_RES (4)..(4): 2-amino-2-(pent-4-en-1-yl)hept-6-enoic acid
  MOD_RES (6)..(6): (S)-3-(2-amino-2-carboxyethyl)benzoic acid
  MOD_RES (11)..(11): (S)-3-amino-1-((pent-4-en-1-yloxy)carbonyl)pyrrolidine-3- carboxylic acid
  MOD_RES (12)..(12): (S)-2-amino-3-(2-(trifluoromethyl)phenyl)propanoic acid
  MOD_RES (13)..(13): (S)-2-amino-3-(naphthalen-2-yl)propanoic acid
  C-term amino
XDXXDXAAFLXFXQ

SEQ ID NO: 1927 - protein, 14 aa, Artificial Sequence
  Description of Artificial Sequence: Synthetic peptide
  N-term Acetic Acid
  MOD_RES (1)..(1): (R)-2-allylpyrrolidine-2-carboxylic acid
  MOD_RES (3)..(3): (S)-2-amino-4,4-dimethylpentanoic acid
  MOD_RES (4)..(4): 2-amino-2-(pent-4-en-1-yl)hept-6-enoic acid
  MOD_RES (6)..(6): (S)-3-(2-amino-2-carboxyethyl)benzoic acid
  MOD_RES (11)..(11): (S)-3-amino-1-((pent-4-en-1-yloxy)carbonyl)pyrrolidine-3- carboxylic acid
  MOD_RES (12)..(12): (S)-2-amino-3-(2-(trifluoromethyl)phenyl)propanoic acid
  MOD_RES (13)..(13): (S)-2-amino-3-(naphthalen-2-yl)propanoic acid
  C-term amino
XDXXDXQAFLXFXA

SEQ ID NO: 1928 - protein, 14 aa, Artificial Sequence
  Description of Artificial Sequence: Synthetic peptide
  N-term Acetic Acid
  MOD_RES (1)..(1): (R)-2-allylpyrrolidine-2-carboxylic acid
  MOD_RES (3)..(3): (S)-2-amino-4,4-dimethylpentanoic acid
  MOD_RES (4)..(4): 2-amino-2-(pent-4-en-1-yl)hept-6-enoic acid
  MOD_RES (6)..(6): (S)-3-(2-amino-2-carboxyethyl)benzoic acid
  MOD_RES (11)..(11): (S)-3-amino-1-((pent-4-en-1-yloxy)carbonyl)pyrrolidine-3- carboxylic acid
  MOD_RES (12)..(12): (S)-2-amino-3-(2-(trifluoromethyl)phenyl)propanoic acid
  MOD_RES (13)..(13): (2S,3R)-2-amino-3-(naphthalen-2-yl)butanoic acid
  C-term amino
XDXXDXAAFLXFXQ

SEQ ID NO: 1929 - protein, 14 aa, Artificial Sequence
  Description of Artificial Sequence: Synthetic peptide
  N-term Acetic Acid
  MOD_RES (1)..(1): (R)-2-allylpyrrolidine-2-carboxylic acid
  MOD_RES (3)..(3): (S)-2-amino-4,4-dimethylpentanoic acid
  MOD_RES (4)..(4): 2-amino-2-(pent-4-en-1-yl)hept-6-enoic acid
  MOD_RES (6)..(6): (S)-3-(2-amino-2-carboxyethyl)benzoic acid
  MOD_RES (11)..(11): (S)-3-amino-1-((pent-4-en-1-yloxy)carbonyl)pyrrolidine-3- carboxylic acid
  MOD_RES (12)..(12): (S)-2-amino-3-(2-(trifluoromethyl)phenyl)propanoic acid
  MOD_RES (13)..(13): (2S,3R)-2-amino-3-(naphthalen-2-yl)butanoic acid
  C-term amino
XDXXDXQAFLXFXA

SEQ ID NO: 1930 - protein, 14 aa, Artificial Sequence
  Description of Artificial Sequence: Synthetic peptide
  N-term Acetic Acid
  MOD_RES (1)..(1): (R)-2-allylpyrrolidine-2-carboxylic acid
  MOD_RES (3)..(3): (S)-2-amino-4,4-dimethylpentanoic acid
  MOD_RES (4)..(4): 2-amino-2-(pent-4-en-1-yl)hept-6-enoic acid
  MOD_RES (6)..(6): (S)-3-(2-amino-2-carboxyethyl)benzoic acid
  MOD_RES (11)..(11): (S)-3-amino-1-((pent-4-en-1-yloxy)carbonyl)pyrrolidine-3- carboxylic acid
  MOD_RES (12)..(12): (S)-2-amino-3-(2-(trifluoromethyl)phenyl)propanoic acid
  MOD_RES (13)..(13): (2S,3S)-2-amino-3-(naphthalen-2-yl)butanoic acid
  C-term amino
XDXXDXAAFLXFXQ

SEQ ID NO: 1931 - protein, 14 aa, Artificial Sequence
  Description of Artificial Sequence: Synthetic peptide
  N-term Acetic Acid
  MOD_RES (1)..(1): (R)-2-allylpyrrolidine-2-carboxylic acid
  MOD_RES (3)..(3): (S)-2-amino-4,4-dimethylpentanoic acid
  MOD_RES (4)..(4): 2-amino-2-(pent-4-en-1-yl)hept-6-enoic acid
  MOD_RES (6)..(6): (S)-3-(2-amino-2-carboxyethyl)benzoic acid
  MOD_RES (11)..(11): (S)-3-amino-1-((pent-4-en-1-yloxy)carbonyl)pyrrolidine-3- carboxylic acid
  MOD_RES (12)..(12): (S)-2-amino-3-(2-(trifluoromethyl)phenyl)propanoic acid
  MOD_RES (13)..(13): (2S,3S)-2-amino-3-(naphthalen-2-yl)butanoic acid
  C-term amino
XDXXDXQAFLXFXA

SEQ ID NO: 1932 - protein, 15 aa, Artificial Sequence
  Description of Artificial Sequence: Synthetic peptide
  N-term Acetic Acid
  MOD_RES (1)..(1): (R)-2-allylpyrrolidine-2-carboxylic acid
  MOD_RES (3)..(3): (S)-2-amino-4,4-dimethylpentanoic acid
  MOD_RES (4)..(4): 2-amino-2-(pent-4-en-1-yl)hept-6-enoic acid
  MOD_RES (6)..(6): (S)-3-(2-amino-2-carboxyethyl)benzoic acid
  MOD_RES (11)..(11): (S)-3-amino-1-((pent-4-en-1-yloxy)carbonyl)pyrrolidine-3- carboxylic acid
  MOD_RES (12)..(12): (S)-2-amino-3-(2-(trifluoromethyl)phenyl)propanoic acid
  MOD_RES (13)..(13): (S)-2-amino-3-(benzo[b]thiophen-3-yl)propanoic acid
  MOD_RES (14)..(14): N5,N5-dimethyl-L-glutamine
  C-term amino
XDXXDXAAFLXFXQA

SEQ ID NO: 1933 - protein, 15 aa, Artificial Sequence
  Description of Artificial Sequence: Synthetic peptide
  N-term Acetic Acid
  MOD_RES (1)..(1): (R)-2-allylpyrrolidine-2-carboxylic acid
  MOD_RES (3)..(3): (S)-2-amino-4,4-dimethylpentanoic acid
  MOD_RES (4)..(4): 2-amino-2-(pent-4-en-1-yl)hept-6-enoic acid
  MOD_RES (6)..(6): (S)-2-amino-3-((carboxymethyl)(2,2,2-trifluoroethyl)amino) propanoic acid
  MOD_RES (11)..(11): (S)-3-amino-1-((pent-4-en-1-yloxy)carbonyl)pyrrolidine-3- carboxylic acid
  MOD_RES (12)..(12): (S)-2-amino-3-(thiophen-3-yl)propanoic acid
  MOD_RES (13)..(13): (S)-2-amino-3-(benzo[b]thiophen-3-yl)propanoic acid
  MOD_RES (14)..(14): N5,N5-dimethyl-L-glutamine
  C-term amino
XDXXDXAAFLXXXQA

SEQ ID NO: 1934 - protein, 15 aa, Artificial Sequence
  Description of Artificial Sequence: Synthetic peptide
  N-term Acetic Acid
  MOD_RES (1)..(1): (R)-2-allylpyrrolidine-2-carboxylic acid
  MOD_RES (3)..(3): (S)-2-amino-4,4-dimethylpentanoic acid
  MOD_RES (4)..(4): 2-amino-2-(pent-4-en-1-yl)hept-6-enoic acid
  MOD_RES (6)..(6): (S)-3-(2-amino-2-carboxyethyl)benzoic acid
  MOD_RES (7)..(7): 2-amino-2-methylpropanoic acid
  MOD_RES (10)..(10): (S)-2-aminobutanoic acid
  MOD_RES (11)..(11): (S)-3-amino-1-((pent-4-en-1-yloxy)carbonyl)pyrrolidine-3- carboxylic acid
  MOD_RES (12)..(12): (S)-2-amino-3-(2-(trifluoromethyl)phenyl)propanoic acid
  MOD_RES (13)..(13): (S)-2-amino-3-(benzo[b]thiophen-3-yl)propanoic acid
  MOD_RES (14)..(14): N5,N5-dimethyl-L-glutamine
  C-term amino
XDXXDXXAFXXFXQA

SEQ ID NO: 1935 - protein, 15 aa, Artificial Sequence
  Description of Artificial Sequence: Synthetic peptide
  N-term Acetic Acid
  MOD_RES (1)..(1): (R)-2-allylpyrrolidine-2-carboxylic acid
  MOD_RES (3)..(3): (S)-2-amino-4,4-dimethylpentanoic acid
  MOD_RES (4)..(4): 2-amino-2-(pent-4-en-1-yl)hept-6-enoic acid
  MOD_RES (6)..(6): (S)-3-(2-amino-2-carboxyethyl)benzoic acid
  MOD_RES (7)..(7): 2-amino-2-methylpropanoic acid
  MOD_RES (10)..(10): (S)-2-aminobutanoic acid
  MOD_RES (11)..(11): (S)-3-amino-1-((pent-4-en-1-yloxy)carbonyl)pyrrolidine-3- carboxylic acid
  MOD_RES (12)..(12): (S)-2-amino-3-(thiophen-3-yl)propanoic acid
  MOD_RES (13)..(13): (S)-2-amino-3-(benzo[b]thiophen-3-yl)propanoic acid
  MOD_RES (14)..(14): N5,N5-dimethyl-L-glutamine
  C-term amino
XDXXDXXAFXXXXQA

SEQ ID NO: 1936 - protein, 15 aa, Artificial Sequence
  Description of Artificial Sequence: Synthetic peptide
  N-term Acetic Acid
  MOD_RES (1)..(1): (R)-2-allylpyrrolidine-2-carboxylic acid
  MOD_RES (3)..(3): (S)-2-amino-4,4-dimethylpentanoic acid
  MOD_RES (4)..(4): 2-amino-2-(pent-4-en-1-yl)hept-6-enoic acid
  MOD_RES (6)..(6): (S)-3-(2-amino-2-carboxyethyl)benzoic acid
  MOD_RES (11)..(11): (S)-3-amino-1-((pent-4-en-1-yloxy)carbonyl)pyrrolidine-3- carboxylic acid
  MOD_RES (12)..(12): (S)-2-amino-3-(2-(trifluoromethyl)phenyl)propanoic acid
  MOD_RES (13)..(13): (S)-2-amino-3-(benzo[b]thiophen-3-yl)propanoic acid
  MOD_RES (14)..(14): N5-ethyl-L-glutamine
  C-term amino
XDXXDXAAFLXFXQA

SEQ ID NO: 1937 - protein, 15 aa, Artificial Sequence
  Description of Artificial Sequence: Synthetic peptide
  N-term Acetic Acid
  MOD_RES (1)..(1): (R)-2-allylpyrrolidine-2-carboxylic acid
  MOD_RES (3)..(3): (S)-2-amino-4,4-dimethylpentanoic acid
  MOD_RES (4)..(4): 2-amino-2-(pent-4-en-1-yl)hept-6-enoic acid
  MOD_RES (6)..(6): (S)-2-amino-3-((carboxymethyl)(2,2,2-trifluoroethyl)amino) propanoic acid
  MOD_RES (11)..(11): (S)-3-amino-1-((pent-4-en-1-yloxy)carbonyl)pyrrolidine-3- carboxylic acid
  MOD_RES (12)..(12): (S)-2-amino-3-(thiophen-3-yl)propanoic acid
  MOD_RES (13)..(13): (S)-2-amino-3-(benzo[b]thiophen-3-yl)propanoic acid
  MOD_RES (14)..(14): N5-ethyl-L-glutamine
  C-term amino
XDXXDXAAFLXXXQA

SEQ ID NO: 1938 - protein, 15 aa, Artificial Sequence
  Description of Artificial Sequence: Synthetic peptide
  N-term Acetic Acid
  MOD_RES (1)..(1): (R)-2-allylpyrrolidine-2-carboxylic acid
  MOD_RES (3)..(3): (S)-2-amino-4,4-dimethylpentanoic acid
  MOD_RES (4)..(4): 2-amino-2-(pent-4-en-1-yl)hept-6-enoic acid
  MOD_RES (6)..(6): (S)-3-(2-amino-2-carboxyethyl)benzoic acid
  MOD_RES (10)..(10): (S)-2-aminobutanoic acid
  MOD_RES (11)..(11): (S)-3-amino-1-((pent-4-en-1-yloxy)carbonyl)pyrrolidine-3- carboxylic acid
  MOD_RES (12)..(12): (S)-2-amino-3-(2-(trifluoromethyl)phenyl)propanoic acid
  MOD_RES (13)..(13): (S)-2-amino-3-(benzo[b]thiophen-3-yl)propanoic acid
  MOD_RES (14)..(14): N5-ethyl-L-glutamine
  C-term amino
XDXXDXAAFXXFXQA

SEQ ID NO: 1939 - protein, 15 aa, Artificial Sequence
  Description of Artificial Sequence: Synthetic peptide
  N-term Acetic Acid
  MOD_RES (1)..(1): (R)-2-allylpyrrolidine-2-carboxylic acid
  MOD_RES (3)..(3): (S)-2-amino-4,4-dimethylpentanoic acid
  MOD_RES (4)..(4): 2-amino-2-(pent-4-en-1-yl)hept-6-enoic acid
  MOD_RES (6)..(6): (S)-3-(2-amino-2-carboxyethyl)benzoic acid
  MOD_RES (7)..(7): 2-amino-2-methylpropanoic acid
  MOD_RES (10)..(10): (S)-2-aminobutanoic acid
  MOD_RES (11)..(11): (S)-3-amino-1-((pent-4-en-1-yloxy)carbonyl)pyrrolidine-3- carboxylic acid
  MOD_RES (12)..(12): (S)-2-amino-3-(thiophen-3-yl)propanoic acid
  MOD_RES (13)..(13): (S)-2-amino-3-(benzo[b]thiophen-3-yl)propanoic acid
  MOD_RES (14)..(14): N5-ethyl-L-glutamine
  C-term amino
XDXXDXXAFXXXXQA

SEQ ID NO: 1940 - protein, 15 aa, Artificial Sequence
  Description of Artificial Sequence: Synthetic peptide
  N-term Acetic Acid
  MOD_RES (1)..(1): (R)-2-allylpyrrolidine-2-carboxylic acid
  MOD_RES (3)..(3): (S)-2-amino-4,4-dimethylpentanoic acid
  MOD_RES (4)..(4): 2-amino-2-(pent-4-en-1-yl)hept-6-enoic acid
  MOD_RES (6)..(6): (S)-2-amino-3-((carboxymethyl)(2,2,2-trifluoroethyl)amino) propanoic acid
  MOD_RES (11)..(11): (S)-3-amino-1-((pent-4-en-1-yloxy)carbonyl)pyrrolidine-3- carboxylic acid
  MOD_RES (12)..(12): (S)-2-amino-3-(thiophen-3-yl)propanoic acid
  MOD_RES (13)..(13): (S)-2-amino-3-(benzo[b]thiophen-3-yl)propanoic acid
  MOD_RES (14)..(14): (S)-2-amino-5-oxo-5-(piperidin-1-yl)pentanoic acid
  C-term amino
XDXXDXAAFLXXXXA

SEQ ID NO: 1941 - protein, 15 aa, Artificial Sequence
  Description of Artificial Sequence: Synthetic peptide
  N-term Acetic Acid
  MOD_RES (1)..(1): (R)-2-allylpyrrolidine-2-carboxylic acid
  MOD_RES (3)..(3): (S)-2-amino-4,4-dimethylpentanoic acid
  MOD_RES (4)..(4): 2-amino-2-(pent-4-en-1-yl)hept-6-enoic acid
  MOD_RES (6)..(6): (S)-3-(2-amino-2-carboxyethyl)benzoic acid
  MOD_RES (10)..(10): (S)-2-aminobutanoic acid
  MOD_RES (11)..(11): (S)-3-amino-1-((pent-4-en-1-yloxy)carbonyl)pyrrolidine-3- carboxylic acid
  MOD_RES (12)..(12): (S)-2-amino-3-(2-(trifluoromethyl)phenyl)propanoic acid
  MOD_RES (13)..(13): (S)-2-amino-3-(benzo[b]thiophen-3-yl)propanoic acid
  MOD_RES (14)..(14): (S)-2-amino-5-oxo-5-(piperidin-1-yl)pentanoic acid
  C-term amino
XDXXDXAAFXXFXXA

SEQ ID NO: 1942 - protein, 15 aa, Artificial Sequence
  Description of Artificial Sequence: Synthetic peptide
  N-term Acetic Acid
  MOD_RES (1)..(1): (R)-2-allylpyrrolidine-2-carboxylic acid
  MOD_RES (3)..(3): (S)-2-amino-4,4-dimethylpentanoic acid
  MOD_RES (4)..(4): 2-amino-2-(pent-4-en-1-yl)hept-6-enoic acid
  MOD_RES (6)..(6): (S)-3-(2-amino-2-carboxyethyl)benzoic acid
  MOD_RES (7)..(7): 2-amino-2-methylpropanoic acid
  MOD_RES (10)..(10): (S)-2-aminobutanoic acid
  MOD_RES (11)..(11): (S)-3-amino-1-((pent-4-en-1-yloxy)carbonyl)pyrrolidine-3- carboxylic acid
  MOD_RES (12)..(12): (S)-2-amino-3-(thiophen-3-yl)propanoic acid
  MOD_RES (13)..(13): (S)-2-amino-3-(benzo[b]thiophen-3-yl)propanoic acid
  MOD_RES (14)..(14): (S)-2-amino-5-oxo-5-(piperidin-1-yl)pentanoic acid
  C-term amino
XDXXDXXAFXXXXXA

SEQ ID NO: 1943 - protein, 14 aa, Artificial Sequence
  Description of Artificial Sequence: Synthetic peptide
  N-term Acetic Acid
  MOD_RES (1)..(1): (R)-2-allylpyrrolidine-2-carboxylic acid
  MOD_RES (3)..(3): (S)-2-amino-4,4-dimethylpentanoic acid
  MOD_RES (4)..(4): 2-amino-2-(pent-4-en-1-yl)hept-6-enoic acid
  MOD_RES (7)..(7): 2-amino-2-methylpropanoic acid
  MOD_RES (11)..(11): (S)-3-amino-1-((pent-4-en-1-yloxy)carbonyl)pyrrolidine-3- carboxylic acid
  MOD_RES (12)..(12): (S)-2-amino-3-(thiophen-3-yl)propanoic acid
  MOD_RES (13)..(13): (S)-2-amino-3-(benzo[b]thiophen-3-yl)propanoic acid
  C-term amino
XDXXNTXAFNXXXK

SEQ ID NO: 1944 - protein, 14 aa, Artificial Sequence
  Description of Artificial Sequence: Synthetic peptide
  N-term Acetic Acid
  MOD_RES (1)..(1): (R)-2-allylpyrrolidine-2-carboxylic acid
  MOD_RES (3)..(3): (S)-2-amino-4,4-dimethylpentanoic acid
  MOD_RES (4)..(4): 2-amino-2-(pent-4-en-1-yl)hept-6-enoic acid
  MOD_RES (7)..(7): 2-amino-2-methylpropanoic acid
  MOD_RES (11)..(11): (S)-3-amino-1-((pent-4-en-1-yloxy)carbonyl)pyrrolidine-3- carboxylic acid
  MOD_RES (12)..(12): (S)-2-amino-3-(thiophen-3-yl)propanoic acid
  MOD_RES (13)..(13): (S)-2-amino-3-(benzo[b]thiophen-3-yl)propanoic acid
  C-term amino
XDXXNTXAFNXXXY

SEQ ID NO: 1945 - protein, 14 aa, Artificial Sequence
  Description of Artificial Sequence: Synthetic peptide
  N-term Acetic Acid
  MOD_RES (1)..(1): (R)-2-allylpyrrolidine-2-carboxylic acid
  MOD_RES (3)..(3): (S)-2-amino-4,4-dimethylpentanoic acid
  MOD_RES (4)..(4): 2-amino-2-(pent-4-en-1-yl)hept-6-enoic acid
  MOD_RES (7)..(7): 2-amino-2-methylpropanoic acid
  MOD_RES (11)..(11): (S)-3-amino-1-((pent-4-en-1-yloxy)carbonyl)pyrrolidine-3- carboxylic acid
  MOD_RES (12)..(12): (S)-2-amino-3-(thiophen-3-yl)propanoic acid
  MOD_RES (13)..(13): (S)-2-amino-3-(benzo[b]thiophen-3-yl)propanoic acid
  C-term amino
XDXXNTXAFNXXXL

SEQ ID NO: 1946 - protein, 14 aa, Artificial Sequence
  Description of Artificial Sequence: Synthetic peptide
  N-term Acetic Acid
  MOD_RES (1)..(1): (R)-2-allylpyrrolidine-2-carboxylic acid
  MOD_RES (3)..(3): (S)-2-amino-4,4-dimethylpentanoic acid
  MOD_RES (4)..(4): 2-amino-2-(pent-4-en-1-yl)hept-6-enoic acid
  MOD_RES (7)..(7): 2-amino-2-methylpropanoic acid
  MOD_RES (11)..(11): (S)-3-amino-1-((pent-4-en-1-yloxy)carbonyl)pyrrolidine-3- carboxylic acid
  MOD_RES (12)..(12): (S)-2-amino-3-(thiophen-3-yl)propanoic acid
  MOD_RES (13)..(13): (S)-2-amino-3-(benzo[b]thiophen-3-yl)propanoic acid
  C-term amino
XDXXNTXAFNXXXV

SEQ ID NO: 1947 - protein, 14 aa, Artificial Sequence
  Description of Artificial Sequence: Synthetic peptide
  N-term Acetic Acid
  MOD_RES (1)..(1): (R)-2-allylpyrrolidine-2-carboxylic acid
  MOD_RES (3)..(3): (S)-2-amino-4,4-dimethylpentanoic acid
  MOD_RES (4)..(4): 2-amino-2-(pent-4-en-1-yl)hept-6-enoic acid
  MOD_RES (7)..(7): 2-amino-2-methylpropanoic acid
  MOD_RES (11)..(11): (S)-3-amino-1-((pent-4-en-1-yloxy)carbonyl)pyrrolidine-3- carboxylic acid
  MOD_RES (12)..(12): (S)-2-amino-3-(thiophen-3-yl)propanoic acid
  MOD_RES (13)..(13): (S)-2-amino-3-(benzo[b]thiophen-3-yl)propanoic acid
  C-term amino
XDXXNTXAFNXXXW

SEQ ID NO: 1948 - protein, 14 aa, Artificial Sequence
  Description of Artificial Sequence: Synthetic peptide
  N-term Acetic Acid
  MOD_RES (1)..(1): (R)-2-allylpyrrolidine-2-carboxylic acid
  MOD_RES (3)..(3): (S)-2-amino-4,4-dimethylpentanoic acid
  MOD_RES (4)..(4): 2-amino-2-(pent-4-en-1-yl)hept-6-enoic acid
  MOD_RES (6)..(6): (S)-1-((1-(2-amino-2-carboxyethyl)-1H-1,2,3-triazol-4-yl)methyl) cyclopropane-1-carboxylic acid
  MOD_RES (11)..(11): (S)-3-amino-1-((pent-4-en-1-yloxy)carbonyl)pyrrolidine-3- carboxylic acid
  MOD_RES (12)..(12): (S)-2-amino-3-(thiophen-3-yl)propanoic acid
  MOD_RES (13)..(13): (S)-2-amino-3-(benzo[b]thiophen-3-yl)propanoic acid
  C-term amino
XDXXDXAAFLXXXQ

SEQ ID NO: 1949 - protein, 14 aa, Artificial Sequence
  Description of Artificial Sequence: Synthetic peptide
  N-term Acetic Acid
  MOD_RES (1)..(1): (R)-2-allylpyrrolidine-2-carboxylic acid
  MOD_RES (3)..(3): (S)-2-amino-4,4-dimethylpentanoic acid
  MOD_RES (4)..(4): 2-amino-2-(pent-4-en-1-yl)hept-6-enoic acid
  MOD_RES (6)..(6): (S)-1-((1-(2-amino-2-carboxyethyl)-1H-1,2,3-triazol-4-yl) methyl)cyclohexane-1-carboxylic acid
  MOD_RES (11)..(11): (S)-3-amino-1-((pent-4-en-1-yloxy)carbonyl)pyrrolidine-3- carboxylic acid
  MOD_RES (12)..(12): (S)-2-amino-3-(thiophen-3-yl)propanoic acid
  MOD_RES (13)..(13): (S)-2-amino-3-(benzo[b]thiophen-3-yl)propanoic acid
  C-term amino
XDXXDXAAFLXXXQ

SEQ ID NO: 1950 - protein, 14 aa, Artificial Sequence
  Description of Artificial Sequence: Synthetic peptide
  N-term Acetic Acid
  MOD_RES (1)..(1): (R)-2-allylpyrrolidine-2-carboxylic acid
  MOD_RES (3)..(3): (S)-2-amino-4,4-dimethylpentanoic acid
  MOD_RES (4)..(4): 2-amino-2-(pent-4-en-1-yl)hept-6-enoic acid
  MOD_RES (6)..(6): (S)-3-(2-amino-2-carboxyethyl)benzoic acid
  MOD_RES (11)..(11): (S)-3-amino-1-((pent-4-en-1-yloxy)carbonyl)pyrrolidine-3- carboxylic acid
  MOD_RES (12)..(12): (S)-2-amino-3-(2-(trifluoromethyl)phenyl)propanoic acid
  MOD_RES (13)..(13): (S)-2-amino-3-(2-(trifluoromethyl)-1H-indol-3-yl)propanoic acid
  C-term amino
XDXXDXAAFLXFXQ

SEQ ID NO: 1951 - protein, 14 aa, Artificial Sequence
  Description of Artificial Sequence: Synthetic peptide
  N-term Acetic Acid
  MOD_RES (1)..(1): (R)-2-allylpyrrolidine-2-carboxylic acid
  MOD_RES (3)..(3): (S)-2-amino-4,4-dimethylpentanoic acid
  MOD_RES (4)..(4): 2-amino-2-(pent-4-en-1-yl)hept-6-enoic acid
  MOD_RES (6)..(6): (S)-3-(2-amino-2-carboxyethyl)benzoic acid
  MOD_RES (11)..(11): (S)-3-amino-1-((pent-4-en-1-yloxy)carbonyl)pyrrolidine-3- carboxylic acid
  MOD_RES (12)..(12): (S)-2-amino-3-(2-(trifluoromethyl)phenyl)propanoic acid
  MOD_RES (13)..(13): (S)-2-amino-3-(2-(trifluoromethyl)-1H-indol-3-yl)propanoic acid
  C-term amino
XDXXDXQAFLXFXA

SEQ ID NO: 1952 - protein, 14 aa, Artificial Sequence
  Description of Artificial Sequence: Synthetic peptide
  N-term Acetic Acid
  MOD_RES (1)..(1): (R)-2-allylpyrrolidine-2-carboxylic acid
  MOD_RES (3)..(3): (S)-2-amino-4,4-dimethylpentanoic acid
  MOD_RES (4)..(4): 2-amino-2-(pent-4-en-1-yl)hept-6-enoic acid
  MOD_RES (6)..(6): (S)-3-(2-amino-2-carboxyethyl)benzoic acid
  MOD_RES (11)..(11): (S)-3-amino-1-((pent-4-en-1-yloxy)carbonyl)pyrrolidine-3- carboxylic acid
  MOD_RES (12)..(12): (S)-2-amino-3-(2-(trifluoromethyl)phenyl)propanoic acid
  MOD_RES (13)..(13): (S)-2-amino-3-(7-chlorobenzo[b]thiophen-3-yl)propanoic acid
  C-term amino
XDXXDXAAFLXFXQ

SEQ ID NO: 1953 - protein, 14 aa, Artificial Sequence
  Description of Artificial Sequence: Synthetic peptide
  N-term Acetic Acid
  MOD_RES (1)..(1): (R)-2-allylpyrrolidine-2-carboxylic acid
  MOD_RES (3)..(3): (S)-2-amino-4,4-dimethylpentanoic acid
  MOD_RES (4)..(4): 2-amino-2-(pent-4-en-1-yl)hept-6-enoic acid
  MOD_RES (6)..(6): (S)-3-(2-amino-2-carboxyethyl)benzoic acid
  MOD_RES (11)..(11): (S)-3-amino-1-((pent-4-en-1-yloxy)carbonyl)pyrrolidine-3- carboxylic acid
  MOD_RES (12)..(12): (S)-2-amino-3-(2-(trifluoromethyl)phenyl)propanoic acid
  MOD_RES (13)..(13): (S)-2-amino-3-(7-chlorobenzo[b]thiophen-3-yl)propanoic acid
  C-term amino
XDXXDXQAFLXFXA

SEQ ID NO: 1954 - protein, 14 aa, Artificial Sequence
  Description of Artificial Sequence: Synthetic peptide
  N-term Acetic Acid
  MOD_RES (1)..(1): (R)-2-allylpyrrolidine-2-carboxylic acid
  MOD_RES (3)..(3): (S)-2-amino-4,4-dimethylpentanoic acid
  MOD_RES (4)..(4): 2-amino-2-(pent-4-en-1-yl)hept-6-enoic acid
  MOD_RES (6)..(6): (S)-3-(2-amino-2-carboxyethyl)benzoic acid
  MOD_RES (11)..(11): (S)-3-amino-1-((pent-4-en-1-yloxy)carbonyl)pyrrolidine-3- carboxylic acid
  MOD_RES (12)..(12): (S)-2-amino-3-(2-(trifluoromethyl)phenyl)propanoic acid
  MOD_RES (13)..(13): (S)-2-amino-3-(7-fluorobenzo[b]thiophen-3-yl)propanoic acid
  C-term amino
XDXXDXAAFLXFXQ

SEQ ID NO: 1955 - protein, 14 aa, Artificial Sequence
  Description of Artificial Sequence: Synthetic peptide
  N-term Acetic Acid
  MOD_RES (1)..(1): (R)-2-allylpyrrolidine-2-carboxylic acid
  MOD_RES (3)..(3): (S)-2-amino-4,4-dimethylpentanoic acid
  MOD_RES (4)..(4): 2-amino-2-(pent-4-en-1-yl)hept-6-enoic acid
  MOD_RES (6)..(6): (S)-3-(2-amino-2-carboxyethyl)benzoic acid
  MOD_RES (11)..(11): (S)-3-amino-1-((pent-4-en-1-yloxy)carbonyl)pyrrolidine-3- carboxylic acid
  MOD_RES (12)..(12): (S)-2-amino-3-(2-(trifluoromethyl)phenyl)propanoic acid
  MOD_RES (13)..(13): (S)-2-amino-3-(7-fluorobenzo[b]thiophen-3-yl)propanoic acid
  C-term amino
XDXXDXQAFLXFXA

SEQ ID NO: 1956 - protein, 14 aa, Artificial Sequence
  Description of Artificial Sequence: Synthetic peptide
  N-term Acetic Acid
  MOD_RES (1)..(1): (R)-2-allylpyrrolidine-2-carboxylic acid
  MOD_RES (3)..(3): (S)-2-amino-4,4-dimethylpentanoic acid
  MOD_RES (4)..(4): 2-amino-2-(pent-4-en-1-yl)hept-6-enoic acid
  MOD_RES (6)..(6): (S)-3-(2-amino-2-carboxyethyl)benzoic acid
  MOD_RES (11)..(11): (S)-3-amino-1-((pent-4-en-1-yloxy)carbonyl)pyrrolidine-3- carboxylic acid
  MOD_RES (12)..(12): (S)-2-amino-3-(2-(trifluoromethyl)phenyl)propanoic acid
  MOD_RES (13)..(13): (S)-2-amino-3-(4-chlorobenzo[b]thiophen-3-yl)propanoic acid
  C-term amino
XDXXDXAAFLXFXQ

SEQ ID NO: 1957 - protein, 14 aa, Artificial Sequence
  Description of Artificial Sequence: Synthetic peptide
  N-term Acetic Acid
  MOD_RES (1)..(1): (R)-2-allylpyrrolidine-2-carboxylic acid
  MOD_RES (3)..(3): (S)-2-amino-4,4-dimethylpentanoic acid
  MOD_RES (4)..(4): 2-amino-2-(pent-4-en-1-yl)hept-6-enoic acid
  MOD_RES (6)..(6): (S)-3-(2-amino-2-carboxyethyl)benzoic acid
  MOD_RES (11)..(11): (S)-3-amino-1-((pent-4-en-1-yloxy)carbonyl)pyrrolidine-3- carboxylic acid
  MOD_RES (12)..(12): (S)-2-amino-3-(2-(trifluoromethyl)phenyl)propanoic acid
  MOD_RES (13)..(13): (S)-2-amino-3-(4-chlorobenzo[b]thiophen-3-yl)propanoic acid
  C-term amino
XDXXDXQAFLXFXA

SEQ ID NO: 1958 - protein, 14 aa, Artificial Sequence
  Description of Artificial Sequence: Synthetic peptide
  N-term Acetic Acid
  MOD_RES (1)..(1): (R)-2-allylpyrrolidine-2-carboxylic acid
  MOD_RES (3)..(3): (S)-2-amino-4,4-dimethylpentanoic acid
  MOD_RES (4)..(4): 2-amino-2-(pent-4-en-1-yl)hept-6-enoic acid
  MOD_RES (7)..(7): 1-aminocyclopropane-1-carboxylic acid
  MOD_RES (11)..(11): (S)-3-amino-1-((pent-4-en-1-yloxy)carbonyl)pyrrolidine-3- carboxylic acid
  MOD_RES (12)..(12): (S)-2-amino-3-(thiophen-3-yl)propanoic acid
  MOD_RES (13)..(13): (S)-2-amino-3-(benzo[b]thiophen-3-yl)propanoic acid
  C-term amino
XDXXNTXAFNXXXQ

SEQ ID NO: 1959 - protein, 14 aa, Artificial Sequence
  Description of Artificial Sequence: Synthetic peptide
  N-term Acetic Acid
  MOD_RES (1)..(1): (R)-2-allylpyrrolidine-2-carboxylic acid
  MOD_RES (3)..(3): (S)-2-amino-4,4-dimethylpentanoic acid
  MOD_RES (4)..(4): 2-amino-2-(pent-4-en-1-yl)hept-6-enoic acid
  MOD_RES (7)..(7): 1-aminocyclopentane-1-carboxylic acid
  MOD_RES (11)..(11): (S)-3-amino-1-((pent-4-en-1-yloxy)carbonyl)pyrrolidine-3- carboxylic acid
  MOD_RES (12)..(12): (S)-2-amino-3-(thiophen-3-yl)propanoic acid
  MOD_RES (13)..(13): (S)-2-amino-3-(benzo[b]thiophen-3-yl)propanoic acid
  C-term amino
XDXXNTXAFNXXXQ

SEQ ID NO: 1960 - protein, 14 aa, Artificial Sequence
  Description of Artificial Sequence: Synthetic peptide
  N-term Acetic Acid
  MOD_RES (1)..(1): (R)-2-allylpyrrolidine-2-carboxylic acid
  MOD_RES (3)..(3): (S)-2-amino-4,4-dimethylpentanoic acid
  MOD_RES (4)..(4): 2-amino-2-(pent-4-en-1-yl)hept-6-enoic acid
  MOD_RES (7)..(7): 2-amino-2-methylpropanoic acid
  MOD_RES (11)..(11): (S)-3-amino-1-((pent-4-en-1-yloxy)carbonyl)pyrrolidine-3- carboxylic acid
  MOD_RES (12)..(12): (S)-2-amino-3-(thiophen-3-yl)propanoic acid
  MOD_RES (13)..(13): (S)-2-amino-3-(benzo[b]thiophen-3-yl)propanoic acid
  MOD_RES (14)..(14): N4-methyl-L-asparagine
  C-term amino
XDXXNTXAFNXXXN

SEQ ID NO: 1961 - protein, 14 aa, Artificial Sequence
  Description of Artificial Sequence: Synthetic peptide
  N-term Acetic Acid
  MOD_RES (1)..(1): (R)-2-allylpyrrolidine-2-carboxylic acid
  MOD_RES (3)..(3): (S)-2-amino-4,4-dimethylpentanoic acid
  MOD_RES (4)..(4): 2-amino-2-(pent-4-en-1-yl)hept-6-enoic acid
  MOD_RES (7)..(7): 2-amino-2-methylpropanoic acid
  MOD_RES (11)..(11): (S)-3-amino-1-((pent-4-en-1-yloxy)carbonyl)pyrrolidine-3- carboxylic acid
  MOD_RES (12)..(12): (S)-2-amino-3-(thiophen-3-yl)propanoic acid
  MOD_RES (13)..(13): (S)-2-amino-3-(benzo[b]thiophen-3-yl)propanoic acid
  MOD_RES (14)..(14): N4-methyl-L-asparagine
  C-term amino
XDXXNTXAFNXXXN

SEQ ID NO: 1962 - protein, 14 aa, Artificial Sequence
  Description of Artificial Sequence: Synthetic peptide
  N-term Acetic Acid
  MOD_RES (1)..(1): (R)-2-allylpyrrolidine-2-carboxylic acid
  MOD_RES (3)..(3): (S)-2-amino-4,4-dimethylpentanoic acid
  MOD_RES (4)..(4): 2-amino-2-(pent-4-en-1-yl)hept-6-enoic acid
  MOD_RES (7)..(7): 2-amino-2-methylpropanoic acid
  MOD_RES (10)..(10): N4-methyl-L-asparagine
  MOD_RES (11)..(11): (S)-3-amino-1-((pent-4-en-1-yloxy)carbonyl)pyrrolidine-3- carboxylic acid
  MOD_RES (12)..(12): (S)-2-amino-3-(thiophen-3-yl)propanoic acid
  MOD_RES (13)..(13): (S)-2-amino-3-(benzo[b]thiophen-3-yl)propanoic acid
  C-term amino
XDXXNTXAFNXXXN

SEQ ID NO: 1963 - protein, 14 aa, Artificial Sequence
  Description of Artificial Sequence: Synthetic peptide
  N-term Acetic Acid
  MOD_RES (1)..(1): (R)-2-allylpyrrolidine-2-carboxylic acid
  MOD_RES (3)..(3): (S)-2-amino-4,4-dimethylpentanoic acid
  MOD_RES (4)..(4): 2-amino-2-(pent-4-en-1-yl)hept-6-enoic acid
  MOD_RES (7)..(7): 2-amino-2-methylpropanoic acid
  MOD_RES (10)..(10): N4-methyl-L-asparagine
  MOD_RES (11)..(11): (S)-3-amino-1-((pent-4-en-1-yloxy)carbonyl)pyrrolidine-3- carboxylic acid
  MOD_RES (12)..(12): (S)-2-amino-3-(thiophen-3-yl)propanoic acid
  MOD_RES (13)..(13): (S)-2-amino-3-(benzo[b]thiophen-3-yl)propanoic acid
  C-term amino
XDXXNTXAFNXXXN

SEQ ID NO: 1964 - protein, 14 aa, Artificial Sequence
  Description of Artificial Sequence: Synthetic peptide
  N-term Acetic Acid
  MOD_RES (1)..(1): (R)-2-allylpyrrolidine-2-carboxylic acid
  MOD_RES (3)..(3): (S)-2-amino-3-cyclohexylpropanoic acid
  MOD_RES (4)..(4): 2-amino-2-(pent-4-en-1-yl)hept-6-enoic acid
  MOD_RES (7)..(7): L-homoserine
  MOD_RES (11)..(11): (S)-3-amino-1-((pent-4-en-1-yloxy)carbonyl)pyrrolidine-3- carboxylic acid
  MOD_RES (13)..(13): (S)-2-amino-3-(benzo[b]thiophen-3-yl)propanoic acid
  MOD_RES (14)..(14): (S)-2-amino-4-morpholino-4-oxobutanoic acid
  C-term amino
XNXXDQSAFLXFXX

SEQ ID NO: 1965 - protein, 14 aa, Artificial Sequence
  Description of Artificial Sequence: Synthetic peptide
  N-term Acetic Acid
  MOD_RES (1)..(1): (R)-2-allylpyrrolidine-2-carboxylic acid
  MOD_RES (3)..(3): (S)-2-amino-3-cyclohexylpropanoic acid
  MOD_RES (4)..(4): 2-amino-2-(pent-4-en-1-yl)hept-6-enoic acid
  MOD_RES (7)..(7): (S)-2-aminohexanoic acid
  MOD_RES (11)..(11): (S)-3-amino-1-((pent-4-en-1-yloxy)carbonyl)pyrrolidine-3- carboxylic acid
  MOD_RES (13)..(13): (S)-2-amino-3-(benzo[b]thiophen-3-yl)propanoic acid
  MOD_RES (14)..(14): (S)-2-amino-4-morpholino-4-oxobutanoic acid
  C-term amino
XNXXDQXAFLXFXX

SEQ ID NO: 1966 - protein, 14 aa, Artificial Sequence
  Description of Artificial Sequence: Synthetic peptide
  N-term Acetic Acid
  MOD_RES (1)..(1): (R)-2-allylpyrrolidine-2-carboxylic acid
  MOD_RES (3)..(3): (S)-2-amino-3-cyclohexylpropanoic acid
  MOD_RES (4)..(4): 2-amino-2-(pent-4-en-1-yl)hept-6-enoic acid
  MOD_RES (7)..(7): (S)-2-amino-6-methylheptanoic acid
  MOD_RES (11)..(11): (S)-3-amino-1-((pent-4-en-1-yloxy)carbonyl)pyrrolidine-3- carboxylic acid
  MOD_RES (13)..(13): (S)-2-amino-3-(benzo[b]thiophen-3-yl)propanoic acid
  MOD_RES (14)..(14): (S)-2-amino-4-morpholino-4-oxobutanoic acid
  C-term amino
XNXXDQXAFLXFXX

SEQ ID NO: 1967 - protein, 14 aa, Artificial Sequence
  Description of Artificial Sequence: Synthetic peptide
  N-term Acetic Acid
  MOD_RES (1)..(1): (R)-2-allylpyrrolidine-2-carboxylic acid
  MOD_RES (3)..(3): (S)-2-amino-3-cyclohexylpropanoic acid
  MOD_RES (4)..(4): 2-amino-2-(pent-4-en-1-yl)hept-6-enoic acid
  MOD_RES (7)..(7): N5,N5-dimethyl-L-glutamine
  MOD_RES (11)..(11): (S)-3-amino-1-((pent-4-en-1-yloxy)carbonyl)pyrrolidine-3- carboxylic acid
  MOD_RES (13)..(13): (S)-2-amino-3-(benzo[b]thiophen-3-yl)propanoic acid
  MOD_RES (14)..(14): (S)-2-amino-4-morpholino-4-oxobutanoic acid
  C-term amino
XNXXDQQAFLXFXX

SEQ ID NO: 1968 - protein, 14 aa, Artificial Sequence
  Description of Artificial Sequence: Synthetic peptide
  N-term Acetic Acid
  MOD_RES (1)..(1): (R)-2-allylpyrrolidine-2-carboxylic acid
  MOD_RES (3)..(3): (S)-2-amino-3-cyclohexylpropanoic acid
  MOD_RES (4)..(4): 2-amino-2-(pent-4-en-1-yl)hept-6-enoic acid
  MOD_RES (7)..(7): N5-methyl-L-glutamine
  MOD_RES (11)..(11): (S)-3-amino-1-((pent-4-en-1-yloxy)carbonyl)pyrrolidine-3- carboxylic acid
  MOD_RES (13)..(13): (S)-2-amino-3-(benzo[b]thiophen-3-yl)propanoic acid
  MOD_RES (14)..(14): (S)-2-amino-4-morpholino-4-oxobutanoic acid
  C-term amino
XNXXDQQAFLXFXX

SEQ ID NO: 1969 - protein, 14 aa, Artificial Sequence
  Description of Artificial Sequence: Synthetic peptide
  N-term Acetic Acid
  MOD_RES (1)..(1): (R)-2-allylpyrrolidine-2-carboxylic acid
  MOD_RES (3)..(3): (S)-2-amino-3-cyclohexylpropanoic acid
  MOD_RES (4)..(4): 2-amino-2-(pent-4-en-1-yl)hept-6-enoic acid
  MOD_RES (11)..(11): (S)-3-amino-1-((pent-4-en-1-yloxy)carbonyl)pyrrolidine-3- carboxylic acid
  MOD_RES (13)..(13): (S)-2-amino-3-(benzo[b]thiophen-3-yl)propanoic acid
  MOD_RES (14)..(14): (S)-2-amino-4-morpholino-4-oxobutanoic acid
  C-term amino
XNXXDQTAFLXFXX

SEQ ID NO: 1970 - protein, 14 aa, Artificial Sequence
  Description of Artificial Sequence: Synthetic peptide
  N-term Acetic Acid
  MOD_RES (1)..(1): (R)-2-allylpyrrolidine-2-carboxylic acid
  MOD_RES (3)..(3): (S)-2-amino-3-cyclohexylpropanoic acid
  MOD_RES (4)..(4): 2-amino-2-(pent-4-en-1-yl)hept-6-enoic acid
  MOD_RES (11)..(11): (S)-3-amino-1-((pent-4-en-1-yloxy)carbonyl)pyrrolidine-3- carboxylic acid
  MOD_RES (13)..(13): (S)-2-amino-3-(benzo[b]thiophen-3-yl)propanoic acid
  MOD_RES (14)..(14): (S)-2-amino-4-morpholino-4-oxobutanoic acid
  C-term amino
XNXXDQQAFLXFXX

SEQ ID NO: 1971 - protein, 14 aa, Artificial Sequence
  Description of Artificial Sequence: Synthetic peptide
  N-term Acetic Acid
  MOD_RES (1)..(1): (R)-2-allylpyrrolidine-2-carboxylic acid
  MOD_RES (3)..(3): (S)-2-amino-4,4-dimethylpentanoic acid
  MOD_RES (4)..(4): 2-amino-2-(hex-5-en-1-yl)oct-7-enoic acid
  MOD_RES (6)..(6): (S)-3-(2-amino-2-carboxyethyl)benzoic acid
  MOD_RES (11)..(11): (S)-1-((allyloxy)carbonyl)-3-aminopyrrolidine-3-carboxylic acid
  MOD_RES (12)..(12): (S)-2-amino-3-(2-(trifluoromethyl)phenyl)propanoic acid
  MOD_RES (13)..(13): (S)-2-amino-3-(benzo[b]thiophen-3-yl)propanoic acid
  C-term amino
XDXXDXAAFLXFXQ

SEQ ID NO: 1972 - protein, 14 aa, Artificial Sequence
  Description of Artificial Sequence: Synthetic peptide
  N-term Acetic Acid
  MOD_RES (1)..(1): (R)-2-allylpyrrolidine-2-carboxylic acid
  MOD_RES (3)..(3): (S)-2-amino-4,4-dimethylpentanoic acid
  MOD_RES (4)..(4): 2-amino-2-(hex-5-en-1-yl)oct-7-enoic acid
  MOD_RES (6)..(6): (S)-3-(2-amino-2-carboxyethyl)benzoic acid
  MOD_RES (11)..(11): (S)-1-((allyloxy)carbonyl)-3-aminopyrrolidine-3-carboxylic acid
  MOD_RES (12)..(12): (S)-2-amino-3-(2-(trifluoromethyl)phenyl)propanoic acid
  MOD_RES (13)..(13): (S)-2-amino-3-(benzo[b]thiophen-3-yl)propanoic acid
  C-term amino
XDXXDXQAFLXFXA

SEQ ID NO: 1973 - protein, 14 aa, Artificial Sequence
  Description of Artificial Sequence: Synthetic peptide
  N-term Acetic Acid
  MOD_RES (1)..(1): (R)-2-allylpyrrolidine-2-carboxylic acid
  MOD_RES (3)..(3): (S)-2-amino-4,4-dimethylpentanoic acid
  MOD_RES (4)..(4): 2-amino-2-(hex-5-en-1-yl)oct-7-enoic acid
  MOD_RES (6)..(6): (S)-3-(2-amino-2-carboxyethyl)benzoic acid
  MOD_RES (11)..(11): (S)-3-amino-1-((but-3-en-1-yloxy)carbonyl)pyrrolidine-3- carboxylic acid
  MOD_RES (12)..(12): (S)-2-amino-3-(2-(trifluoromethyl)phenyl)propanoic acid
  MOD_RES (13)..(13): (S)-2-amino-3-(benzo[b]thiophen-3-yl)propanoic acid
  C-term amino
XDXXDXAAFLXFXQ

SEQ ID NO: 1974 - protein, 14 aa, Artificial Sequence
  Description of Artificial Sequence: Synthetic peptide
  N-term Acetic Acid
  MOD_RES (1)..(1): (R)-2-allylpyrrolidine-2-carboxylic acid
  MOD_RES (3)..(3): (S)-2-amino-4,4-dimethylpentanoic acid
  MOD_RES (4)..(4): 2-amino-2-(hex-5-en-1-yl)oct-7-enoic acid
  MOD_RES (6)..(6): (S)-3-(2-amino-2-carboxyethyl)benzoic acid
  MOD_RES (11)..(11): (S)-3-amino-1-((but-3-en-1-yloxy)carbonyl)pyrrolidine-3- carboxylic acid
  MOD_RES (12)..(12): (S)-2-amino-3-(2-(trifluoromethyl)phenyl)propanoic acid
  MOD_RES (13)..(13): (S)-2-amino-3-(benzo[b]thiophen-3-yl)propanoic acid
  C-term amino
XDXXDXQAFLXFXA

SEQ ID NO: 1975 - protein, 14 aa, Artificial Sequence
  Description of Artificial Sequence: Synthetic peptide
  N-term Acetic Acid
  MOD_RES (1)..(1): (R)-2-allylpyrrolidine-2-carboxylic acid
  MOD_RES (3)..(3): (S)-2-amino-4,4-dimethylpentanoic acid
  MOD_RES (4)..(4): 2-amino-2-(hex-5-en-1-yl)oct-7-enoic acid
  MOD_RES (6)..(6): (S)-3-(2-amino-2-carboxyethyl)benzoic acid
  MOD_RES (11)..(11): (S)-3-amino-1-((pent-4-en-1-yloxy)carbonyl)pyrrolidine-3- carboxylic acid
  MOD_RES (12)..(12): (S)-2-amino-3-(2-(trifluoromethyl)phenyl)propanoic acid
  MOD_RES (13)..(13): (S)-2-amino-3-(benzo[b]thiophen-3-yl)propanoic acid
  C-term amino
XDXXDXAAFLXFXQ

SEQ ID NO: 1976 - protein, 14 aa, Artificial Sequence
  Description of Artificial Sequence: Synthetic peptide
  N-term Acetic Acid
  MOD_RES (1)..(1): (R)-2-allylpyrrolidine-2-carboxylic acid
  MOD_RES (3)..(3): (S)-2-amino-4,4-dimethylpentanoic acid
  MOD_RES (4)..(4): 2-amino-2-(hex-5-en-1-yl)oct-7-enoic acid
  MOD_RES (6)..(6): (S)-3-(2-amino-2-carboxyethyl)benzoic acid
  MOD_RES (11)..(11): (S)-3-amino-1-((pent-4-en-1-yloxy)carbonyl)pyrrolidine-3- carboxylic acid
  MOD_RES (12)..(12): (S)-2-amino-3-(2-(trifluoromethyl)phenyl)propanoic acid
  MOD_RES (13)..(13): (S)-2-amino-3-(benzo[b]thiophen-3-yl)propanoic acid
  C-term amino
XDXXDXQAFLXFXA

SEQ ID NO: 1977 - protein, 14 aa, Artificial Sequence
  Description of Artificial Sequence: Synthetic peptide
  N-term Acetic Acid
  MOD_RES (1)..(1): (R)-2-allylpyrrolidine-2-carboxylic acid
  MOD_RES (3)..(3): (S)-2-amino-4,4-dimethylpentanoic acid
  MOD_RES (4)..(4): 2-amino-2-(pent-4-en-1-yl)hept-6-enoic acid
  MOD_RES (6)..(6): (S)-1-((1-(2-amino-2-carboxyethyl)-1H-1,2,3-triazol-4-yl) methyl)cyclohexane-1-carboxylic acid
  MOD_RES (11)..(11): (S)-3-amino-1-((pent-4-en-1-yloxy)carbonyl)pyrrolidine-3- carboxylic acid
  MOD_RES (12)..(12): (S)-2-amino-3-(2-(trifluoromethyl)phenyl)propanoic acid
  MOD_RES (13)..(13): (S)-2-amino-3-(benzo[b]thiophen-3-yl)propanoic acid
  C-term amino
XDXXDXQAFLXFXA

SEQ ID NO: 1978 - protein, 14 aa, Artificial Sequence
  Description of Artificial Sequence: Synthetic peptide
  N-term Acetic Acid
  MOD_RES (1)..(1): (R)-2-allylpyrrolidine-2-carboxylic acid
  MOD_RES (3)..(3): (S)-2-amino-4,4-dimethylpentanoic acid
  MOD_RES (4)..(4): 2-amino-2-(pent-4-en-1-yl)hept-6-enoic acid
  MOD_RES (6)..(6): (S)-1-((1-(2-amino-2-carboxyethyl)-1H-1,2,3-triazol-4-yl) methyl)cyclohexane-1-carboxylic acid
  MOD_RES (11)..(11): (S)-3-amino-1-((pent-4-en-1-yloxy)carbonyl)pyrrolidine-3- carboxylic acid
  MOD_RES (12)..(12): (S)-2-amino-3-(2-(trifluoromethyl)phenyl)propanoic acid
  MOD_RES (13)..(13): (S)-2-amino-3-(benzo[b]thiophen-3-yl)propanoic acid
  C-term amino
XDXXDXAAFLXFXS

SEQ ID NO: 1979 - protein, 14 aa, Artificial Sequence
  Description of Artificial Sequence: Synthetic peptide
  N-term Acetic Acid
  MOD_RES (1)..(1): (R)-2-allylpyrrolidine-2-carboxylic acid
  MOD_RES (3)..(3): (S)-2-amino-3-cyclohexylpropanoic acid
  MOD_RES (4)..(4): 2-amino-2-(pent-4-en-1-yl)hept-6-enoic acid
  MOD_RES (7)..(7): N6-acetyl-L-lysine
  MOD_RES (11)..(11): (S)-3-amino-1-((pent-4-en-1-yloxy)carbonyl)pyrrolidine-3- carboxylic acid
  MOD_RES (13)..(13): (S)-2-amino-3-(benzo[b]thiophen-3-yl)propanoic acid
  MOD_RES (14)..(14): (S)-2-amino-4-morpholino-4-oxobutanoic acid
  C-term amino
XNXXDQKAFLXFXX

SEQ ID NO: 1980 - protein, 14 aa, Artificial Sequence
  Description of Artificial Sequence: Synthetic peptide
  N-term Acetic Acid
  MOD_RES (1)..(1): (R)-2-allylpyrrolidine-2-carboxylic acid
  MOD_RES (3)..(3): (S)-2-amino-3-cyclohexylpropanoic acid
  MOD_RES (4)..(4): 2-amino-2-(pent-4-en-1-yl)hept-6-enoic acid
  MOD_RES (7)..(7): N6-benzoyl-L-lysine
  MOD_RES (11)..(11): (S)-3-amino-1-((pent-4-en-1-yloxy)carbonyl)pyrrolidine-3- carboxylic acid
  MOD_RES (13)..(13): (S)-2-amino-3-(benzo[b]thiophen-3-yl)propanoic acid
  MOD_RES (14)..(14): (S)-2-amino-4-morpholino-4-oxobutanoic acid
  C-term amino
XNXXDQKAFLXFXX

SEQ ID NO: 1981 - protein, 14 aa, Artificial Sequence
  Description of Artificial Sequence: Synthetic peptide
  N-term Acetic Acid
  MOD_RES (1)..(1): (R)-2-allylpyrrolidine-2-carboxylic acid
  MOD_RES (3)..(3): (S)-2-amino-3-cyclohexylpropanoic acid
  MOD_RES (4)..(4): 2-amino-2-(pent-4-en-1-yl)hept-6-enoic acid
  MOD_RES (7)..(7): N6-(methylsulfonyl)-L-lysine
  MOD_RES (11)..(11): (S)-3-amino-1-((pent-4-en-1-yloxy)carbonyl)pyrrolidine-3- carboxylic acid
  MOD_RES (13)..(13): (S)-2-amino-3-(benzo[b]thiophen-3-yl)propanoic acid
  MOD_RES (14)..(14): (S)-2-amino-4-morpholino-4-oxobutanoic acid
  C-term amino
XNXXDQKAFLXFXX

SEQ ID NO: 1982 - protein, 14 aa, Artificial Sequence
  Description of Artificial Sequence: Synthetic peptide
  N-term Acetic Acid
  MOD_RES (1)..(1): (R)-2-allylpyrrolidine-2-carboxylic acid
  MOD_RES (3)..(3): (S)-2-amino-3-cyclohexylpropanoic acid
  MOD_RES (4)..(4): 2-amino-2-(pent-4-en-1-yl)hept-6-enoic acid
  MOD_RES (7)..(7): N6-(2,2,2-trifluoroacetyl)-L-lysine
  MOD_RES (11)..(11): (S)-3-amino-1-((pent-4-en-1-yloxy)carbonyl)pyrrolidine-3- carboxylic acid
  MOD_RES (13)..(13): (S)-2-amino-3-(benzo[b]thiophen-3-yl)propanoic acid
  MOD_RES (14)..(14): (S)-2-amino-4-morpholino-4-oxobutanoic acid
  C-term amino
XNXXDQKAFLXFXX

SEQ ID NO: 1983 - protein, 14 aa, Artificial Sequence
  Description of Artificial Sequence: Synthetic peptide
  N-term Acetic Acid
  MOD_RES (1)..(1): (R)-2-allylpyrrolidine-2-carboxylic acid
  MOD_RES (3)..(3): (S)-2-amino-3-cyclohexylpropanoic acid
  MOD_RES (4)..(4): 2-amino-2-(pent-4-en-1-yl)hept-6-enoic acid
  MOD_RES (7)..(7): (S)-20-amino-14-oxo-2,5,8,11-tetraoxa-15-azahenicosan-21-oic acid
  MOD_RES (11)..(11): (S)-3-amino-1-((pent-4-en-1-yloxy)carbonyl)pyrrolidine-3- carboxylic acid
  MOD_RES (13)..(13): (S)-2-amino-3-(benzo[b]thiophen-3-yl)propanoic acid
  MOD_RES (14)..(14): (S)-2-amino-4-morpholino-4-oxobutanoic acid
  C-term amino
XNXXDQXAFLXFXX

SEQ ID NO: 1984 - protein, 14 aa, Artificial Sequence
  Description of Artificial Sequence: Synthetic peptide
  N-term Acetic Acid
  MOD_RES (1)..(1): (R)-2-allylpyrrolidine-2-carboxylic acid
  MOD_RES (3)..(3): (S)-2-amino-3-cyclohexylpropanoic acid
  MOD_RES (4)..(4): 2-amino-2-(pent-4-en-1-yl)hept-6-enoic acid
  MOD_RES (7)..(7): N6-(2-morpholinoacetyl)-L-lysine
  MOD_RES (11)..(11): (S)-3-amino-1-((pent-4-en-1-yloxy)carbonyl)pyrrolidine-3- carboxylic acid
  MOD_RES (13)..(13): (S)-2-amino-3-(benzo[b]thiophen-3-yl)propanoic acid
  MOD_RES (14)..(14): (S)-2-amino-4-morpholino-4-oxobutanoic acid
  C-term amino
XNXXDQKAFLXFXX

SEQ ID NO: 1985 - protein, 14 aa, Artificial Sequence
  Description of Artificial Sequence: Synthetic peptide
  N-term Acetic Acid
  MOD_RES (1)..(1): (R)-2-allylpyrrolidine-2-carboxylic acid
  MOD_RES (3)..(3): (S)-2-amino-3-cyclohexylpropanoic acid
  MOD_RES (4)..(4): 2-amino-2-(pent-4-en-1-yl)hept-6-enoic acid
  MOD_RES (7)..(7): N6-(3-(dimethylamino)propanoyl)-L-lysine
  MOD_RES (11)..(11): (S)-3-amino-1-((pent-4-en-1-yloxy)carbonyl)pyrrolidine-3- carboxylic acid
  MOD_RES (13)..(13): (S)-2-amino-3-(benzo[b]thiophen-3-yl)propanoic acid
  MOD_RES (14)..(14): (S)-2-amino-4-morpholino-4-oxobutanoic acid
  C-term amino
XNXXDQKAFLXFXX

SEQ ID NO: 1986 - protein, 14 aa, Artificial Sequence
  Description of Artificial Sequence: Synthetic peptide
  N-term hex-5-enoic acid
  MOD_RES (1)..(1): (R)-2-allylpyrrolidine-2-carboxylic acid
  MOD_RES (3)..(3): (S)-2-aminopent-4-enoic acid
  MOD_RES (4)..(4): 2-amino-2-(pent-4-en-1-yl)hept-6-enoic acid
  MOD_RES (6)..(6): (S)-3-(2-amino-2-carboxyethyl)benzoic acid
  MOD_RES (11)..(11): (S)-3-amino-1-((pent-4-en-1-yloxy)carbonyl)pyrrolidine-3- carboxylic acid
  MOD_RES (12)..(12): (S)-2-amino-3-(2-(trifluoromethyl)phenyl)propanoic acid
  MOD_RES (13)..(13): (S)-2-amino-3-(benzo[b]thiophen-3-yl)propanoic acid
  C-term amino
XDXXDXAAFLXFXQ

SEQ ID NO: 1987 - protein, 14 aa, Artificial Sequence
  Description of Artificial Sequence: Synthetic peptide
  N-term pent-4-enoic acid
  MOD_RES (1)..(1): (R)-2-allylpyrrolidine-2-carboxylic acid
  MOD_RES (3)..(3): (S)-2-aminopent-4-enoic acid
  MOD_RES (4)..(4): 2-amino-2-(pent-4-en-1-yl)hept-6-enoic acid
  MOD_RES (6)..(6): (S)-3-(2-amino-2-carboxyethyl)benzoic acid
  MOD_RES (11)..(11): (S)-3-amino-1-((pent-4-en-1-yloxy)carbonyl)pyrrolidine-3- carboxylic acid
  MOD_RES (12)..(12): (S)-2-amino-3-(2-(trifluoromethyl)phenyl)propanoic acid
  MOD_RES (13)..(13): (S)-2-amino-3-(benzo[b]thiophen-3-yl)propanoic acid
  C-term amino
XDXXDXAAFLXFXQ

SEQ ID NO: 1988 - protein, 14 aa, Artificial Sequence
  Description of Artificial Sequence: Synthetic peptide
  N-term Acetic Acid
  MOD_RES (1)..(1): (R)-2-allylpyrrolidine-2-carboxylic acid
  MOD_RES (3)..(3): (S)-2-aminohexanoic acid
  MOD_RES (4)..(4): 2-amino-2-(pent-4-en-1-yl)hept-6-enoic acid
  MOD_RES (6)..(6): (S)-3-(2-amino-2-carboxyethyl)benzoic acid
  MOD_RES (11)..(11): (S)-3-amino-1-((pent-4-en-1-yloxy)carbonyl)pyrrolidine-3- carboxylic acid
  MOD_RES (12)..(12): (S)-2-amino-3-(2-(trifluoromethyl)phenyl)propanoic acid
  MOD_RES (13)..(13): (S)-2-amino-3-(benzo[b]thiophen-3-yl)propanoic acid
  C-term amino
XDXXDXAAFLXFXQ

SEQ ID NO: 1989 - protein, 14 aa, Artificial Sequence
  Description of Artificial Sequence: Synthetic peptide
  N-term Acetic Acid
  MOD_RES (1)..(1): (R)-2-allylpyrrolidine-2-carboxylic acid
  MOD_RES (3)..(3): (S)-2-amino-4,4-dimethylpentanoic acid
  MOD_RES (4)..(4): 2-amino-2-(pent-4-en-1-yl)hept-6-enoic acid
  MOD_RES (6)..(6): (S)-3-(2-amino-2-carboxyethyl)benzoic acid
  MOD_RES (11)..(11): (S)-3-amino-1-((pent-4-en-1-yloxy)carbonyl)pyrrolidine-3- carboxylic acid
  MOD_RES (12)..(12): (S)-2-amino-3-(2-(trifluoromethyl)phenyl)propanoic acid
  MOD_RES (13)..(13): (S)-2-amino-3-(benzo[b]thiophen-3-yl)propanoic acid
  MOD_RES (14)..(14): N5,N5-dimethyl-L-glutamine
  C-term amino
XDXXDXAAFLXFXQ

SEQ ID NO: 1990 - protein, 14 aa, Artificial Sequence
  Description of Artificial Sequence: Synthetic peptide
  N-term Acetic Acid
  MOD_RES (1)..(1): (R)-2-allylpyrrolidine-2-carboxylic acid
  MOD_RES (3)..(3): (S)-2-amino-4,4-dimethylpentanoic acid
  MOD_RES (4)..(4): 2-amino-2-(pent-4-en-1-yl)hept-6-enoic acid
  MOD_RES (6)..(6): (S)-3-(2-amino-2-carboxyethyl)benzoic acid
  MOD_RES (10)..(10): (S)-2-aminohexanoic acid
  MOD_RES (11)..(11): (S)-3-amino-1-((pent-4-en-1-yloxy)carbonyl)pyrrolidine-3- carboxylic acid
  MOD_RES (12)..(12): (S)-2-amino-3-(2-(trifluoromethyl)phenyl)propanoic acid
  MOD_RES (13)..(13): (S)-2-amino-3-(benzo[b]thiophen-3-yl)propanoic acid
  MOD_RES (14)..(14): N5,N5-dimethyl-L-glutamine
  C-term amino
XDXXDXAAFXXFXQ

SEQ ID NO: 1991 - protein, 14 aa, Artificial Sequence
  Description of Artificial Sequence: Synthetic peptide
  N-term Acetic Acid
  MOD_RES (1)..(1): (R)-2-allylpyrrolidine-2-carboxylic acid
  MOD_RES (3)..(3): (S)-2-amino-4,4-dimethylpentanoic acid
  MOD_RES (4)..(4): 2-amino-2-(pent-4-en-1-yl)hept-6-enoic acid
  MOD_RES (6)..(6): (S)-3-(2-amino-2-carboxyethyl)benzoic acid
  MOD_RES (11)..(11): (S)-3-amino-1-((pent-4-en-1-yloxy)carbonyl)pyrrolidine-3- carboxylic acid
  MOD_RES (12)..(12): (S)-2-amino-3-(2-(trifluoromethyl)phenyl)propanoic acid
  MOD_RES (13)..(13): (S)-2-amino-3-(benzo[b]thiophen-3-yl)propanoic acid
  MOD_RES (14)..(14): N5,N5-dimethyl-L-glutamine
  C-term amino
XDXXDXAAFFXFXQ

SEQ ID NO: 1992 - protein, 14 aa, Artificial Sequence
  Description of Artificial Sequence: Synthetic peptide
  N-term Acetic Acid
  MOD_RES (1)..(1): (R)-2-allylpyrrolidine-2-carboxylic acid
  MOD_RES (3)..(3): (S)-2-amino-4,4-dimethylpentanoic acid
  MOD_RES (4)..(4): 2-amino-2-(pent-4-en-1-yl)hept-6-enoic acid
  MOD_RES (6)..(6): (S)-3-(2-amino-2-carboxyethyl)benzoic acid
  MOD_RES (10)..(10): N5,N5-dimethyl-L-glutamine
  MOD_RES (11)..(11): (S)-3-amino-1-((pent-4-en-1-yloxy)carbonyl)pyrrolidine-3- carboxylic acid
  MOD_RES (12)..(12): (S)-2-amino-3-(2-(trifluoromethyl)phenyl)propanoic acid
  MOD_RES (13)..(13): (S)-2-amino-3-(benzo[b]thiophen-3-yl)propanoic acid
  MOD_RES (14)..(14): N5,N5-dimethyl-L-glutamine
  C-term amino
XDXXDXAAFQXFXQ

SEQ ID NO: 1993 - protein, 14 aa, Artificial Sequence
  Description of Artificial Sequence: Synthetic peptide
  N-term Acetic Acid
  MOD_RES (1)..(1): (R)-2-allylpyrrolidine-2-carboxylic acid
  MOD_RES (3)..(3): (S)-2-amino-4,4-dimethylpentanoic acid
  MOD_RES (4)..(4): 2-amino-2-(pent-4-en-1-yl)hept-6-enoic acid
  MOD_RES (6)..(6): (S)-3-(2-amino-2-carboxyethyl)benzoic acid
  MOD_RES (10)..(10): (S)-2-amino-5-morpholino-5-oxopentanoic acid
  MOD_RES (11)..(11): (S)-3-amino-1-((pent-4-en-1-yloxy)carbonyl)pyrrolidine-3- carboxylic acid
  MOD_RES (12)..(12): (S)-2-amino-3-(2-(trifluoromethyl)phenyl)propanoic acid
  MOD_RES (13)..(13): (S)-2-amino-3-(benzo[b]thiophen-3-yl)propanoic acid
  MOD_RES (14)..(14): N5,N5-dimethyl-L-glutamine
  C-term amino
XDXXDXAAFXXFXQ

SEQ ID NO: 1994 - protein, 14 aa, Artificial Sequence
  Description of Artificial Sequence: Synthetic peptide
  N-term Acetic Acid
  MOD_RES (1)..(1): (R)-2-allylpyrrolidine-2-carboxylic acid
  MOD_RES (3)..(3): (S)-2-amino-4,4-dimethylpentanoic acid
  MOD_RES (4)..(4): 2-amino-2-(pent-4-en-1-yl)hept-6-enoic acid
  MOD_RES (6)..(6): (S)-3-(2-amino-2-carboxyethyl)benzoic acid
  MOD_RES (10)..(10): N6-acetyl-L-lysine
  MOD_RES (11)..(11): (S)-3-amino-1-((pent-4-en-1-yloxy)carbonyl)pyrrolidine-3- carboxylic acid
  MOD_RES (12)..(12): (S)-2-amino-3-(2-(trifluoromethyl)phenyl)propanoic acid
  MOD_RES (13)..(13): (S)-2-amino-3-(benzo[b]thiophen-3-yl)propanoic acid
  MOD_RES (14)..(14): N5,N5-dimethyl-L-glutamine
  C-term amino
XDXXDXAAFKXFXQ

SEQ ID NO: 1995 - protein, 14 aa, Artificial Sequence
  Description of Artificial Sequence: Synthetic peptide
  N-term Acetic Acid
  MOD_RES (1)..(1): (R)-2-allylpyrrolidine-2-carboxylic acid
  MOD_RES (3)..(3): (S)-2-amino-4,4-dimethylpentanoic acid
  MOD_RES (4)..(4): 2-amino-2-(pent-4-en-1-yl)hept-6-enoic acid
  MOD_RES (6)..(6): (S)-3-(2-amino-2-carboxyethyl)benzoic acid
  MOD_RES (11)..(11): (S)-3-amino-1-((pent-4-en-1-yloxy)carbonyl)pyrrolidine-3- carboxylic acid
  MOD_RES (12)..(12): (S)-2-amino-3-(2-(trifluoromethyl)phenyl)propanoic acid
  MOD_RES (13)..(13): (S)-2-amino-3-(benzo[b]thiophen-3-yl)propanoic acid
  MOD_RES (14)..(14): (S)-2-amino-5-morpholino-5-oxopentanoic acid
  C-term amino
XDXXDXAAFLXFXX

SEQ ID NO: 1996 - protein, 14 aa, Artificial Sequence
  Description of Artificial Sequence: Synthetic peptide
  N-term Acetic Acid
  MOD_RES (1)..(1): (R)-2-allylpyrrolidine-2-carboxylic acid
  MOD_RES (3)..(3): (S)-2-amino-4,4-dimethylpentanoic acid
  MOD_RES (4)..(4): 2-amino-2-(pent-4-en-1-yl)hept-6-enoic acid
  MOD_RES (6)..(6): (S)-3-(2-amino-2-carboxyethyl)benzoic acid
  MOD_RES (10)..(10): (S)-2-aminohexanoic acid
  MOD_RES (11)..(11): (S)-3-amino-1-((pent-4-en-1-yloxy)carbonyl)pyrrolidine-3- carboxylic acid
  MOD_RES (12)..(12): (S)-2-amino-3-(2-(trifluoromethyl)phenyl)propanoic acid
  MOD_RES (13)..(13): (S)-2-amino-3-(benzo[b]thiophen-3-yl)propanoic acid
  MOD_RES (14)..(14): (S)-2-amino-5-morpholino-5-oxopentanoic acid
  C-term amino
XDXXDXAAFXXFXX

SEQ ID NO: 1997 - protein, 14 aa, Artificial Sequence
  Description of Artificial Sequence: Synthetic peptide
  N-term Acetic Acid
  MOD_RES (1)..(1): (R)-2-allylpyrrolidine-2-carboxylic acid
  MOD_RES (3)..(3): (S)-2-amino-4,4-dimethylpentanoic acid
  MOD_RES (4)..(4): 2-amino-2-(pent-4-en-1-yl)hept-6-enoic acid
  MOD_RES (6)..(6): (S)-3-(2-amino-2-carboxyethyl)benzoic acid
  MOD_RES (11)..(11): (S)-3-amino-1-((pent-4-en-1-yloxy)carbonyl)pyrrolidine-3- carboxylic acid
  MOD_RES (12)..(12): (S)-2-amino-3-(2-(trifluoromethyl)phenyl)propanoic acid
  MOD_RES (13)..(13): (S)-2-amino-3-(benzo[b]thiophen-3-yl)propanoic acid
  MOD_RES (14)..(14): (S)-2-amino-5-morpholino-5-oxopentanoic acid
  C-term amino
XDXXDXAAFFXFXX

SEQ ID NO: 1998 - protein, 14 aa, Artificial Sequence
  Description of Artificial Sequence: Synthetic peptide
  N-term Acetic Acid
  MOD_RES (1)..(1): (R)-2-allylpyrrolidine-2-carboxylic acid
  MOD_RES (3)..(3): (S)-2-amino-4,4-dimethylpentanoic acid
  MOD_RES (4)..(4): 2-amino-2-(pent-4-en-1-yl)hept-6-enoic acid
  MOD_RES (6)..(6): (S)-3-(2-amino-2-carboxyethyl)benzoic acid
  MOD_RES (10)..(10): N5,N5-dimethyl-L-glutamine
  MOD_RES (11)..(11): (S)-3-amino-1-((pent-4-en-1-yloxy)carbonyl)pyrrolidine-3- carboxylic acid
  MOD_RES (12)..(12): (S)-2-amino-3-(2-(trifluoromethyl)phenyl)propanoic acid
  MOD_RES (13)..(13): (S)-2-amino-3-(benzo[b]thiophen-3-yl)propanoic acid
  MOD_RES (14)..(14): (S)-2-amino-5-morpholino-5-oxopentanoic acid
  C-term amino
XDXXDXAAFQXFXX

SEQ ID NO: 1999 - protein, 14 aa, Artificial Sequence
  Description of Artificial Sequence: Synthetic peptide
  N-term Acetic Acid
  MOD_RES (1)..(1): (R)-2-allylpyrrolidine-2-carboxylic acid
  MOD_RES (3)..(3): (S)-2-amino-4,4-dimethylpentanoic acid
  MOD_RES (4)..(4): 2-amino-2-(pent-4-en-1-yl)hept-6-enoic acid
  MOD_RES (6)..(6): (S)-3-(2-amino-2-carboxyethyl)benzoic acid
  MOD_RES (10)..(10): (S)-2-amino-5-morpholino-5-oxopentanoic acid
  MOD_RES (11)..(11): (S)-3-amino-1-((pent-4-en-1-yloxy)carbonyl)pyrrolidine-3- carboxylic acid
  MOD_RES (12)..(12): (S)-2-amino-3-(2-(trifluoromethyl)phenyl)propanoic acid
  MOD_RES (13)..(13): (S)-2-amino-3-(benzo[b]thiophen-3-yl)propanoic acid
  MOD_RES (14)..(14): (S)-2-amino-5-morpholino-5-oxopentanoic acid
  C-term amino
XDXXDXAAFXXFXX

SEQ ID NO: 2000 - protein, 14 aa, Artificial Sequence
  Description of Artificial Sequence: Synthetic peptide
  N-term Acetic Acid
  MOD_RES (1)..(1): (R)-2-allylpyrrolidine-2-carboxylic acid
  MOD_RES (3)..(3): (S)-2-amino-4,4-dimethylpentanoic acid
  MOD_RES (4)..(4): 2-amino-2-(pent-4-en-1-yl)hept-6-enoic acid
  MOD_RES (6)..(6): (S)-3-(2-amino-2-carboxyethyl)benzoic acid
  MOD_RES (10)..(10): N6-acetyl-L-lysine
  MOD_RES (11)..(11): (S)-3-amino-1-((pent-4-en-1-yloxy)carbonyl)pyrrolidine-3- carboxylic acid
  MOD_RES (12)..(12): (S)-2-amino-3-(2-(trifluoromethyl)phenyl)propanoic acid
  MOD_RES (13)..(13): (S)-2-amino-3-(benzo[b]thiophen-3-yl)propanoic acid
  MOD_RES (14)..(14): (S)-2-amino-5-morpholino-5-oxopentanoic acid
  C-term amino
XDXXDXAAFKXFXX

SEQ ID NO: 2001 - protein, 14 aa, Artificial Sequence
  Description of Artificial Sequence: Synthetic peptide
  MOD_RES (1)..(1): (3-(allyloxy)phenyl)methanol
  MOD_RES (2)..(2): acetyl-L-aspartic acid
  MOD_RES (3)..(3): (S)-2-amino-4,4-dimethylpentanoic acid
  MOD_RES (4)..(4): 2-amino-2-(pent-4-en-1-yl)hept-6-enoic acid
  MOD_RES (6)..(6): (S)-2-amino-3-((carboxymethyl)(2,2,2-trifluoroethyl)amino) propanoic acid
  MOD_RES (11)..(11): (S)-3-amino-1-((pent-4-en-1-yloxy)carbonyl)pyrrolidine-3- carboxylic acid
  MOD_RES (12)..(12): (S)-2-amino-3-(thiophen-3-yl)propanoic acid
  MOD_RES (13)..(13): (S)-2-amino-3-(benzo[b]thiophen-3-yl)propanoic acid
  C-term amino
XDXXDXAAFLXXXQ

SEQ ID NO: 2002 - protein, 14 aa, Artificial Sequence
  Description of Artificial Sequence: Synthetic peptide
  N-term Acetic Acid
  MOD_RES (1)..(1): (R)-2-allylpyrrolidine-2-carboxylic acid
  MOD_RES (3)..(3): (S)-2-amino-4,4-dimethylpentanoic acid
  MOD_RES (4)..(4): 2-amino-2-(pent-4-en-1-yl)hept-6-enoic acid
  MOD_RES (6)..(6): (S)-3-(2-amino-2-carboxyethyl)benzoic acid
  MOD_RES (7)..(7): 2-amino-2-methylpropanoic acid
  MOD_RES (10)..(10): (S)-2-aminohexanoic acid
  MOD_RES (11)..(11): (S)-3-amino-1-((pent-4-en-1-yloxy)carbonyl)pyrrolidine-3- carboxylic acid
  MOD_RES (12)..(12): (S)-2-amino-3-(thiophen-3-yl)propanoic acid
  MOD_RES (13)..(13): (S)-2-amino-3-(benzo[b]thiophen-3-yl)propanoic acid
  MOD_RES (14)..(14): N5,N5-dimethyl-L-glutamine
  C-term amino
XDXXDXXAFXXXXQ

SEQ ID NO: 2003 - protein, 14 aa, Artificial Sequence
  Description of Artificial Sequence: Synthetic peptide
  N-term Acetic Acid
  MOD_RES (1)..(1): (R)-2-allylpyrrolidine-2-carboxylic acid
  MOD_RES (3)..(3): (S)-2-amino-4,4-dimethylpentanoic acid
  MOD_RES (4)..(4): 2-amino-2-(pent-4-en-1-yl)hept-6-enoic acid
  MOD_RES (6)..(6): (S)-3-(2-amino-2-carboxyethyl)benzoic acid
  MOD_RES (7)..(7): 2-amino-2-methylpropanoic acid
  MOD_RES (10)..(10): (S)-2-aminohexanoic acid
  MOD_RES (11)..(11): (S)-3-amino-1-((pent-4-en-1-yloxy)carbonyl)pyrrolidine-3- carboxylic acid
  MOD_RES (12)..(12): (S)-2-amino-3-(thiophen-3-yl)propanoic acid
  MOD_RES (13)..(13): (S)-2-amino-3-(benzo[b]thiophen-3-yl)propanoic acid
  MOD_RES (14)..(14): N5-ethyl-L-glutamine
  C-term amino
XDXXDXXAFXXXXQ

SEQ ID NO: 2004 - protein, 14 aa, Artificial Sequence
  Description of Artificial Sequence: Synthetic peptide
  N-term Acetic Acid
  MOD_RES (1)..(1): (R)-2-allylpyrrolidine-2-carboxylic acid
  MOD_RES (3)..(3): (S)-2-amino-4,4-dimethylpentanoic acid
  MOD_RES (4)..(4): 2-amino-2-(pent-4-en-1-yl)hept-6-enoic acid
  MOD_RES (6)..(6): (S)-3-(2-amino-2-carboxyethyl)benzoic acid
  MOD_RES (7)..(7): 2-amino-2-methylpropanoic acid
  MOD_RES (10)..(10): (S)-2-aminohexanoic acid
  MOD_RES (11)..(11): (S)-3-amino-1-((pent-4-en-1-yloxy)carbonyl)pyrrolidine-3- carboxylic acid
  MOD_RES (12)..(12): (S)-2-amino-3-(thiophen-3-yl)propanoic acid
  MOD_RES (13)..(13): (S)-2-amino-3-(benzo[b]thiophen-3-yl)propanoic acid
  MOD_RES (14)..(14): (S)-2-amino-5-morpholino-5-oxopentanoic acid
  C-term amino
XDXXDXXAFXXXXX

SEQ ID NO: 2005 - protein, 14 aa, Artificial Sequence
  Description of Artificial Sequence: Synthetic peptide
  N-term Acetic Acid
  MOD_RES (1)..(1): (R)-2-allylpyrrolidine-2-carboxylic acid
  MOD_RES (3)..(3): (S)-2-amino-4,4-dimethylpentanoic acid
  MOD_RES (4)..(4): 2-amino-2-(pent-4-en-1-yl)hept-6-enoic acid
  MOD_RES (6)..(6): (S)-3-(2-amino-2-carboxyethyl)benzoic acid
  MOD_RES (7)..(7): 2-amino-2-methylpropanoic acid
  MOD_RES (10)..(10): (S)-2-aminohexanoic acid
  MOD_RES (11)..(11): (S)-3-amino-1-((pent-4-en-1-yloxy)carbonyl)pyrrolidine-3- carboxylic acid
  MOD_RES (12)..(12): (S)-2-amino-3-(thiophen-3-yl)propanoic acid
  MOD_RES (13)..(13): (S)-2-amino-3-(benzo[b]thiophen-3-yl)propanoic acid
  MOD_RES (14)..(14): N5,N5-bis(2-methoxyethyl)-L-glutamine
  C-term amino
XDXXDXXAFXXXXQ

SEQ ID NO: 2006 - protein, 14 aa, Artificial Sequence
  Description of Artificial Sequence: Synthetic peptide
  N-term Acetic Acid
  MOD_RES (1)..(1): (R)-2-allylpyrrolidine-2-carboxylic acid
  MOD_RES (3)..(3): (S)-2-amino-4,4-dimethylpentanoic acid
  MOD_RES (4)..(4): 2-amino-2-(pent-4-en-1-yl)hept-6-enoic acid
  MOD_RES (6)..(6): (S)-3-(2-amino-2-carboxyethyl)benzoic acid
  MOD_RES (7)..(7): 2-amino-2-methylpropanoic acid
  MOD_RES (10)..(10): (S)-2-aminohexanoic acid
  MOD_RES (11)..(11): (S)-3-amino-1-((pent-4-en-1-yloxy)carbonyl)pyrrolidine-3- carboxylic acid
  MOD_RES (12)..(12): (S)-2-amino-3-(thiophen-3-yl)propanoic acid
  MOD_RES (13)..(13): (S)-2-amino-3-(benzo[b]thiophen-3-yl)propanoic acid
  MOD_RES (14)..(14): (S)-5-([1,4'-bipiperidin]-1'-yl)-2-amino-5-oxopentanoic acid
  C-term amino
XDXXDXXAFXXXXX

SEQ ID NO: 2007 - protein, 14 aa, Artificial Sequence
  Description of Artificial Sequence: Synthetic peptide
  N-term Acetic Acid
  MOD_RES (1)..(1): (R)-2-allylpyrrolidine-2-carboxylic acid
  MOD_RES (3)..(3): (S)-2-amino-4,4-dimethylpentanoic acid
  MOD_RES (4)..(4): 2-amino-2-(pent-4-en-1-yl)hept-6-enoic acid
  MOD_RES (6)..(6): (S)-3-(2-amino-2-carboxyethyl)benzoic acid
  MOD_RES (7)..(7): 2-amino-2-methylpropanoic acid
  MOD_RES (10)..(10): (S)-2-aminohexanoic acid
  MOD_RES (11)..(11): (S)-3-amino-1-((pent-4-en-1-yloxy)carbonyl)pyrrolidine-3- carboxylic acid
  MOD_RES (12)..(12): (S)-2-amino-3-(thiophen-3-yl)propanoic acid
  MOD_RES (13)..(13): (S)-2-amino-3-(benzo[b]thiophen-3-yl)propanoic acid
  MOD_RES (14)..(14): (S)-5-(4-acetylpiperazin-1-yl)-2-amino-5-oxopentanoic acid
  C-term amino
XDXXDXXAFXXXXX

SEQ ID NO: 2008 - protein, 14 aa, Artificial Sequence
  Description of Artificial Sequence: Synthetic peptide
  N-term Acetic Acid
  MOD_RES (1)..(1): (R)-2-allylpyrrolidine-2-carboxylic acid
  MOD_RES (3)..(3): (S)-2-amino-4,4-dimethylpentanoic acid
  MOD_RES (4)..(4): 2-amino-2-(pent-4-en-1-yl)hept-6-enoic acid
  MOD_RES (6)..(6): (S)-3-(2-amino-2-carboxyethyl)benzoic acid
  MOD_RES (7)..(7): 2-amino-2-methylpropanoic acid
  MOD_RES (10)..(10): (S)-2-aminohexanoic acid
  MOD_RES (11)..(11): (S)-3-amino-1-((pent-4-en-1-yloxy)carbonyl)pyrrolidine-3- carboxylic acid
  MOD_RES (12)..(12): (S)-2-amino-3-(thiophen-3-yl)propanoic acid
  MOD_RES (13)..(13): (S)-2-amino-3-(benzo[b]thiophen-3-yl)propanoic acid
  MOD_RES (14)..(14): (S)-2-amino-5-oxo-5-(4-(trifluoromethyl)piperidin-1-yl) pentanoic acid
  C-term amino
XDXXDXXAFXXXXX

SEQ ID NO: 2009 - protein, 14 aa, Artificial Sequence
  Description of Artificial Sequence: Synthetic peptide
  N-term Acetic Acid
  MOD_RES (1)..(1): (R)-2-allylpyrrolidine-2-carboxylic acid
  MOD_RES (3)..(3): (S)-2-amino-4,4-dimethylpentanoic acid
  MOD_RES (4)..(4): 2-amino-2-(pent-4-en-1-yl)hept-6-enoic acid
  MOD_RES (6)..(6): (S)-3-(2-amino-2-carboxyethyl)benzoic acid
  MOD_RES (7)..(7): 2-amino-2-methylpropanoic acid
  MOD_RES (10)..(10): (S)-2-aminobutanoic acid
  MOD_RES (11)..(11): (S)-3-amino-1-((pent-4-en-1-yloxy)carbonyl)pyrrolidine-3- carboxylic acid
  MOD_RES (12)..(12): (S)-2-amino-3-(thiophen-3-yl)propanoic acid
  MOD_RES (13)..(13): (S)-2-amino-3-(benzo[b]thiophen-3-yl)propanoic acid
  MOD_RES (14)..(14): (S)-2-amino-5-morpholino-5-oxopentanoic acid
  C-term amino
XDXXDXXAFXXXXX

SEQ ID NO: 2010 - protein, 14 aa, Artificial Sequence
  Description of Artificial Sequence: Synthetic peptide
  N-term Acetic Acid
  MOD_RES (1)..(1): (R)-2-allylpyrrolidine-2-carboxylic acid
  MOD_RES (3)..(3): (S)-2-amino-4,4-dimethylpentanoic acid
  MOD_RES (4)..(4): 2-amino-2-(pent-4-en-1-yl)hept-6-enoic acid
  MOD_RES (6)..(6): (S)-3-(2-amino-2-carboxyethyl)benzoic acid
  MOD_RES (7)..(7): 2-amino-2-methylpropanoic acid
  MOD_RES (10)..(10): (S)-2-aminobutanoic acid
  MOD_RES (11)..(11): (S)-3-amino-1-((pent-4-en-1-yloxy)carbonyl)pyrrolidine-3- carboxylic acid
  MOD_RES (12)..(12): (S)-2-amino-3-(thiophen-3-yl)propanoic acid
  MOD_RES (13)..(13): (S)-2-amino-3-(benzo[b]thiophen-3-yl)propanoic acid
  MOD_RES (14)..(14): N5,N5-bis(2-methoxyethyl)-L-glutamine
  C-term amino
XDXXDXXAFXXXXQ

SEQ ID NO: 2011 - protein, 14 aa, Artificial Sequence
  Description of Artificial Sequence: Synthetic peptide
  N-term Acetic Acid
  MOD_RES (1)..(1): (R)-2-allylpyrrolidine-2-carboxylic acid
  MOD_RES (3)..(3): (S)-2-amino-4,4-dimethylpentanoic acid
  MOD_RES (4)..(4): 2-amino-2-(pent-4-en-1-yl)hept-6-enoic acid
  MOD_RES (6)..(6): (S)-3-(2-amino-2-carboxyethyl)benzoic acid
  MOD_RES (7)..(7): 2-amino-2-methylpropanoic acid
  MOD_RES (10)..(10): (S)-2-aminobutanoic acid
  MOD_RES (11)..(11): (S)-3-amino-1-((pent-4-en-1-yloxy)carbonyl)pyrrolidine-3- carboxylic acid
  MOD_RES (12)..(12): (S)-2-amino-3-(thiophen-3-yl)propanoic acid
  MOD_RES (13)..(13): (S)-2-amino-3-(benzo[b]thiophen-3-yl)propanoic acid
  MOD_RES (14)..(14): (S)-5-([1,4'-bipiperidin]-1'-yl)-2-amino-5-oxopentanoic acid
  C-term amino
XDXXDXXAFXXXXX

SEQ ID NO: 2012 - protein, 14 aa, Artificial Sequence
  Description of Artificial Sequence: Synthetic peptide
  N-term Acetic Acid
  MOD_RES (1)..(1): (R)-2-allylpyrrolidine-2-carboxylic acid
  MOD_RES (3)..(3): (S)-2-amino-4,4-dimethylpentanoic acid
  MOD_RES (4)..(4): 2-amino-2-(pent-4-en-1-yl)hept-6-enoic acid
  MOD_RES (6)..(6): (S)-3-(2-amino-2-carboxyethyl)benzoic acid
  MOD_RES (7)..(7): 2-amino-2-methylpropanoic acid
  MOD_RES (10)..(10): (S)-2-aminobutanoic acid
  MOD_RES (11)..(11): (S)-3-amino-1-((pent-4-en-1-yloxy)carbonyl)pyrrolidine-3- carboxylic acid
  MOD_RES (12)..(12): (S)-2-amino-3-(thiophen-3-yl)propanoic acid
  MOD_RES (13)..(13): (S)-2-amino-3-(benzo[b]thiophen-3-yl)propanoic acid
  MOD_RES (14)..(14): (S)-5-(4-acetylpiperazin-1-yl)-2-amino-5-oxopentanoic acid
  C-term amino
XDXXDXXAFXXXXX

SEQ ID NO: 2013 - protein, 15 aa, Artificial Sequence
  Description of Artificial Sequence: Synthetic peptide
  N-term Acetic Acid
  MOD_RES (1)..(1): (R)-2-allylpyrrolidine-2-carboxylic acid
  MOD_RES (3)..(3): (S)-2-amino-3-((carboxymethyl)(2,2,2-trifluoroethyl)amino) propanoic acid
  MOD_RES (4)..(4): 2-amino-2-(pent-4-en-1-yl)hept-6-enoic acid
  MOD_RES (10)..(10): (S)-2-amino-3-(4-bromophenyl)propanoic acid
  MOD_RES (11)..(11): (S)-2-amino-2-methyldec-9-enoic acid
  MOD_RES (14)..(14): (S)-2-amino-3-(benzo[b]thiophen-3-yl)propanoic acid
  C-term amino
XYXXADDAAFXAFXQ

SEQ ID NO: 2014 - protein, 14 aa, Artificial Sequence
  Description of Artificial Sequence: Synthetic peptide
  N-term Acetic Acid
  MOD_RES (1)..(1): (R)-2-amino-2-methylpent-4-enoic acid
  MOD_RES (3)..(3): (S)-2-amino-4,4-dimethylpentanoic acid
  MOD_RES (4)..(4): 2-amino-2-(pent-4-en-1-yl)hept-6-enoic acid
  MOD_RES (6)..(6): (S)-3-(2-amino-2-carboxyethyl)benzoic acid
  MOD_RES (11)..(11): (S)-3-amino-1-((pent-4-en-1-yloxy)carbonyl)pyrrolidine-3- carboxylic acid
  MOD_RES (12)..(12): (S)-2-amino-3-(2-(trifluoromethyl)phenyl)propanoic acid
  MOD_RES (13)..(13): (S)-2-amino-3-(benzo[b]thiophen-3-yl)propanoic acid
  C-term amino
XDXXDXAAFLXFXQ

SEQ ID NO: 2015 - protein, 14 aa, Artificial Sequence
  Description of Artificial Sequence: Synthetic peptide
  N-term Acetic Acid
  MOD_RES (1)..(1): (R)-2-amino-2-methylhept-6-enoic acid
  MOD_RES (3)..(3): (S)-2-amino-4,4-dimethylpentanoic acid
  MOD_RES (4)..(4): 2-amino-2-(pent-4-en-1-yl)hept-6-enoic acid
  MOD_RES (6)..(6): (S)-3-(2-amino-2-carboxyethyl)benzoic acid
  MOD_RES (11)..(11): (S)-3-amino-1-((pent-4-en-1-yloxy)carbonyl)pyrrolidine-3- carboxylic acid
  MOD_RES (12)..(12): (S)-2-amino-3-(2-(trifluoromethyl)phenyl)propanoic acid
  MOD_RES (13)..(13): (S)-2-amino-3-(benzo[b]thiophen-3-yl)propanoic acid
  C-term amino
XDXXDXAAFLXFXQ

SEQ ID NO: 2016 - protein, 15 aa, Artificial Sequence
  Description of Artificial Sequence: Synthetic peptide
  N-term Acetic Acid
  MOD_RES (2)..(2): (R)-2-amino-2-methylpent-4-enoic acid
  MOD_RES (4)..(4): (S)-2-amino-4,4-dimethylpentanoic acid
  MOD_RES (5)..(5): 2-amino-2-(pent-4-en-1-yl)hept-6-enoic acid
  MOD_RES (7)..(7): (S)-3-(2-amino-2-carboxyethyl)benzoic acid
  MOD_RES (12)..(12): (S)-3-amino-1-((pent-4-en-1-yloxy)carbonyl)pyrrolidine-3- carboxylic acid
  MOD_RES (13)..(13): (S)-2-amino-3-(2-(trifluoromethyl)phenyl)propanoic acid
  MOD_RES (14)..(14): (S)-2-amino-3-(benzo[b]thiophen-3-yl)propanoic acid
  C-term amino
PXDXXDXAAFLXFXQ

SEQ ID NO: 2017 - protein, 15 aa, Artificial Sequence
  Description of Artificial Sequence: Synthetic peptide
  N-term Acetic Acid
  MOD_RES (2)..(2): (R)-2-amino-2-methylhept-6-enoic acid
  MOD_RES (4)..(4): (S)-2-amino-4,4-dimethylpentanoic acid
  MOD_RES (5)..(5): 2-amino-2-(pent-4-en-1-yl)hept-6-enoic acid
  MOD_RES (7)..(7): (S)-3-(2-amino-2-carboxyethyl)benzoic acid
  MOD_RES (12)..(12): (S)-3-amino-1-((pent-4-en-1-yloxy)carbonyl)pyrrolidine-3- carboxylic acid
  MOD_RES (13)..(13): (S)-2-amino-3-(2-(trifluoromethyl)phenyl)propanoic acid
  MOD_RES (14)..(14): (S)-2-amino-3-(benzo[b]thiophen-3-yl)propanoic acid
  C-term amino
PXDXXDXAAFLXFXQ

SEQ ID NO: 2018 - protein, 15 aa, Artificial Sequence
  Description of Artificial Sequence: Synthetic peptide
  N-term Acetic Acid
  MOD_RES (1)..(1): (R)-1-((allyloxy)carbonyl)-3-aminopyrrolidine-3-carboxylic acid
  MOD_RES (4)..(4): (S)-2-amino-4,4-dimethylpentanoic acid
  MOD_RES (5)..(5): 2-amino-2-(pent-4-en-1-yl)hept-6-enoic acid
  MOD_RES (7)..(7): (S)-3-(2-amino-2-carboxyethyl)benzoic acid
  MOD_RES (12)..(12): (S)-3-amino-1-((pent-4-en-1-yloxy)carbonyl)pyrrolidine-3- carboxylic acid
  MOD_RES (13)..(13): (S)-2-amino-3-(2-(trifluoromethyl)phenyl)propanoic acid
  MOD_RES (14)..(14): (S)-2-amino-3-(benzo[b]thiophen-3-yl)propanoic acid
  C-term amino
XADXXDXAAFLXFXQ

SEQ ID NO: 2019 - protein, 15 aa, Artificial Sequence
  Description of Artificial Sequence: Synthetic peptide
  N-term Acetic Acid
  MOD_RES (1)..(1): (R)-1-((allyloxy)carbonyl)-3-aminopyrrolidine-3-carboxylic acid
  MOD_RES (4)..(4): (S)-2-amino-4,4-dimethylpentanoic acid
  MOD_RES (5)..(5): 2-amino-2-(pent-4-en-1-yl)hept-6-enoic acid
  MOD_RES (7)..(7): (S)-3-(2-amino-2-carboxyethyl)benzoic acid
  MOD_RES (12)..(12): (S)-3-amino-1-((pent-4-en-1-yloxy)carbonyl)pyrrolidine-3- carboxylic acid
  MOD_RES (13)..(13): (S)-2-amino-3-(2-(trifluoromethyl)phenyl)propanoic acid
  MOD_RES (14)..(14): (S)-2-amino-3-(benzo[b]thiophen-3-yl)propanoic acid
  C-term amino
XEDXXDXAAFLXFXQ

SEQ ID NO: 2020 - protein, 15 aa, Artificial Sequence
  Description of Artificial Sequence: Synthetic peptide
  N-term Acetic Acid
  MOD_RES (1)..(1): (R)-2-amino-2-methylhept-6-enoic acid
  MOD_RES (4)..(4): (S)-2-amino-4,4-dimethylpentanoic acid
  MOD_RES (5)..(5): 2-amino-2-(pent-4-en-1-yl)hept-6-enoic acid
  MOD_RES (7)..(7): (S)-3-(2-amino-2-carboxyethyl)benzoic acid
  MOD_RES (12)..(12): (S)-3-amino-1-((pent-4-en-1-yloxy)carbonyl)pyrrolidine-3- carboxylic acid
  MOD_RES (13)..(13): (S)-2-amino-3-(2-(trifluoromethyl)phenyl)propanoic acid
  MOD_RES (14)..(14): (S)-2-amino-3-(benzo[b]thiophen-3-yl)propanoic acid
  C-term amino
XADXXDXAAFLXFXQ

SEQ ID NO: 2021 - protein, 16 aa, Artificial Sequence
  Description of Artificial Sequence: Synthetic peptide
  N-term Acetic Acid
  MOD_RES (2)..(2): (R)-2-amino-2-methylhept-6-enoic acid
  MOD_RES (5)..(5): (S)-2-amino-4,4-dimethylpentanoic acid
  MOD_RES (6)..(6): 2-amino-2-(pent-4-en-1-yl)hept-6-enoic acid
  MOD_RES (8)..(8): (S)-3-(2-amino-2-carboxyethyl)benzoic acid
  MOD_RES (13)..(13): (S)-3-amino-1-((pent-4-en-1-yloxy)carbonyl)pyrrolidine-3- carboxylic acid
  MOD_RES (14)..(14): (S)-2-amino-3-(2-(trifluoromethyl)phenyl)propanoic acid
  MOD_RES (15)..(15): (S)-2-amino-3-(benzo[b]thiophen-3-yl)propanoic acid
  C-term amino
PXEDXXDXAAFLXFXQ

SEQ ID NO: 2022 - protein, 15 aa, Artificial Sequence
  Description of Artificial Sequence: Synthetic peptide
  N-term Acetic Acid
  MOD_RES (1)..(1): (R)-2-allylpyrrolidine-2-carboxylic acid
  MOD_RES (3)..(3): (S)-2-amino-4,4-dimethylpentanoic acid
  MOD_RES (4)..(4): 2-amino-2-(pent-4-en-1-yl)hept-6-enoic acid
  MOD_RES (6)..(6): (S)-3-(2-amino-2-carboxyethyl)benzoic acid
  MOD_RES (7)..(7): 2-amino-2-methylpropanoic acid
  MOD_RES (10)..(10): D-serine
  MOD_RES (11)..(11): (S)-3-amino-1-((pent-4-en-1-yloxy)carbonyl)pyrrolidine-3- carboxylic acid
  MOD_RES (12)..(12): (S)-2-amino-3-(thiophen-3-yl)propanoic acid
  MOD_RES (13)..(13): (S)-2-amino-3-(benzo[b]thiophen-3-yl)propanoic acid
  MOD_RES (14)..(14): D-serine
  C-term amino
XDXXDXXAFSXXXSA

SEQ ID NO: 2023 - protein, 15 aa, Artificial Sequence
  Description of Artificial Sequence: Synthetic peptide
  N-term Acetic Acid
  MOD_RES (1)..(1): (R)-2-allylpyrrolidine-2-carboxylic acid
  MOD_RES (3)..(3): (S)-2-amino-4,4-dimethylpentanoic acid
  MOD_RES (4)..(4): 2-amino-2-(pent-4-en-1-yl)hept-6-enoic acid
  MOD_RES (6)..(6): (S)-3-(2-amino-2-carboxyethyl)benzoic acid
  MOD_RES (7)..(7): 2-amino-2-methylpropanoic acid
  MOD_RES (11)..(11): (S)-3-amino-1-((pent-4-en-1-yloxy)carbonyl)pyrrolidine-3- carboxylic acid
  MOD_RES (12)..(12): (S)-2-amino-3-(thiophen-3-yl)propanoic acid
  MOD_RES (13)..(13): (S)-2-amino-3-(benzo[b]thiophen-3-yl)propanoic acid
  C-term amino
XDXXDXXAFSXXXSA

SEQ ID NO: 2024 - protein, 15 aa, Artificial Sequence
  Description of Artificial Sequence: Synthetic peptide
  N-term Acetic Acid
  MOD_RES (1)..(1): (R)-2-allylpyrrolidine-2-carboxylic acid
  MOD_RES (3)..(3): (S)-2-amino-4,4-dimethylpentanoic acid
  MOD_RES (4)..(4): 2-amino-2-(pent-4-en-1-yl)hept-6-enoic acid
  MOD_RES (6)..(6): (S)-3-(2-amino-2-carboxyethyl)benzoic acid
  MOD_RES (7)..(7): 2-amino-2-methylpropanoic acid
  MOD_RES (10)..(10): N6-acetyl-L-lysine
  MOD_RES (11)..(11): (S)-3-amino-1-((pent-4-en-1-yloxy)carbonyl)pyrrolidine-3- carboxylic acid
  MOD_RES (12)..(12): (S)-2-amino-3-(thiophen-3-yl)propanoic acid
  MOD_RES (13)..(13): (S)-2-amino-3-(benzo[b]thiophen-3-yl)propanoic acid
  C-term amino
XDXXDXXAFKXXXAA

SEQ ID NO: 2025 - protein, 15 aa, Artificial Sequence
  Description of Artificial Sequence: Synthetic peptide
  N-term Acetic Acid
  MOD_RES (1)..(1): (R)-2-allylpyrrolidine-2-carboxylic acid
  MOD_RES (3)..(3): (S)-2-amino-4,4-dimethylpentanoic acid
  MOD_RES (4)..(4): 2-amino-2-(pent-4-en-1-yl)hept-6-enoic acid
  MOD_RES (6)..(6): (S)-3-(2-amino-2-carboxyethyl)benzoic acid
  MOD_RES (7)..(7): 2-amino-2-methylpropanoic acid
  MOD_RES (10)..(10): N6-acetyl-L-lysine
  MOD_RES (11)..(11): (S)-3-amino-1-((pent-4-en-1-yloxy)carbonyl)pyrrolidine-3- carboxylic acid
  MOD_RES (12)..(12): (S)-2-amino-3-(2-(trifluoromethyl)phenyl)propanoic acid
  MOD_RES (13)..(13): (S)-2-amino-3-(benzo[b]thiophen-3-yl)propanoic acid
  C-term amino
XDXXDXXAFKXFXAA

SEQ ID NO: 2026 - protein, 14 aa, Artificial Sequence
  Description of Artificial Sequence: Synthetic peptide
  N-term Acetic Acid
  MOD_RES (1)..(1): (R)-2-allylpyrrolidine-2-carboxylic acid
  MOD_RES (3)..(3): (S)-2-amino-4,4-dimethylpentanoic acid
  MOD_RES (4)..(4): 2-amino-2-(pent-4-en-1-yl)hept-6-enoic acid
  MOD_RES (6)..(6): (S)-3-(2-amino-2-carboxyethyl)benzoic acid
  MOD_RES (11)..(11): 4-amino-1-((but-3-en-1-yloxy)carbonyl)piperidine-4-carboxylic acid
  MOD_RES (12)..(12): (S)-2-amino-3-(2-(trifluoromethyl)phenyl)propanoic acid
  MOD_RES (13)..(13): (S)-2-amino-3-(benzo[b]thiophen-3-yl)propanoic acid
  C-term amino
XDXXDXAAFLXFXQ

SEQ ID NO: 2027 - protein, 14 aa, Artificial Sequence
  Description of Artificial Sequence: Synthetic peptide
  N-term Acetic Acid
  MOD_RES (1)..(1): (R)-2-allylpyrrolidine-2-carboxylic acid
  MOD_RES (3)..(3): (S)-2-amino-4,4-dimethylpentanoic acid
  MOD_RES (4)..(4): 2-amino-2-(pent-4-en-1-yl)hept-6-enoic acid
  MOD_RES (6)..(6): (S)-3-(2-amino-2-carboxyethyl)benzoic acid
  MOD_RES (11)..(11): 4-amino-1-((pent-4-en-1-yloxy)carbonyl)piperidine-4- carboxylic acid
  MOD_RES (12)..(12): (S)-2-amino-3-(2-(trifluoromethyl)phenyl)propanoic acid
  MOD_RES (13)..(13): (S)-2-amino-3-(benzo[b]thiophen-3-yl)propanoic acid
  C-term amino
XDXXDXAAFLXFXQ

SEQ ID NO: 2028 - protein, 14 aa, Artificial Sequence
  Description of Artificial Sequence: Synthetic peptide
  N-term Acetic Acid
  MOD_RES (1)..(1): (R)-2-allylpyrrolidine-2-carboxylic acid
  MOD_RES (3)..(3): (S)-2-amino-4,4-dimethylpentanoic acid
  MOD_RES (4)..(4): 2-amino-2-(pent-4-en-1-yl)hept-6-enoic acid
  MOD_RES (6)..(6): (S)-3-(2-amino-2-carboxyethyl)benzoic acid
  MOD_RES (11)..(11): 4-amino-1-((hex-5-en-1-yloxy)carbonyl)piperidine-4-carboxylic acid
  MOD_RES (12)..(12): (S)-2-amino-3-(2-(trifluoromethyl)phenyl)propanoic acid
  MOD_RES (13)..(13): (S)-2-amino-3-(benzo[b]thiophen-3-yl)propanoic acid
  C-term amino
XDXXDXAAFLXFXQ

SEQ ID NO: 2029 - protein, 14 aa, Artificial Sequence
  Description of Artificial Sequence: Synthetic peptide
  N-term Acetic Acid
  MOD_RES (1)..(1): (R)-2-allylpyrrolidine-2-carboxylic acid
  MOD_RES (3)..(3): (S)-2-amino-4,4-dimethylpentanoic acid
  MOD_RES (4)..(4): 2-amino-2-(pent-4-en-1-yl)hept-6-enoic acid
  MOD_RES (6)..(6): (S)-3-(2-amino-2-carboxyethyl)benzoic acid
  MOD_RES (11)..(11): 4-amino-1-((but-3-en-1-yloxy)carbonyl)piperidine-4-carboxylic acid
  MOD_RES (12)..(12): (S)-2-amino-3-(2-(trifluoromethyl)phenyl)propanoic acid
  MOD_RES (13)..(13): (S)-2-amino-3-(benzo[b]thiophen-3-yl)propanoic acid
  C-term amino
XDXXDXQAFLXFXA

SEQ ID NO: 2030 - protein, 14 aa, Artificial Sequence
  Description of Artificial Sequence: Synthetic peptide
  N-term Acetic Acid
  MOD_RES (1)..(1): (R)-2-allylpyrrolidine-2-carboxylic acid
  MOD_RES (3)..(3): (S)-2-amino-4,4-dimethylpentanoic acid
  MOD_RES (4)..(4): 2-amino-2-(pent-4-en-1-yl)hept-6-enoic acid
  MOD_RES (6)..(6): (S)-3-(2-amino-2-carboxyethyl)benzoic acid
  MOD_RES (11)..(11): 4-amino-1-((pent-4-en-1-yloxy)carbonyl)piperidine-4- carboxylic acid
  MOD_RES (12)..(12): (S)-2-amino-3-(2-(trifluoromethyl)phenyl)propanoic acid
  MOD_RES (13)..(13): (S)-2-amino-3-(benzo[b]thiophen-3-yl)propanoic acid
  C-term amino
XDXXDXQAFLXFXA

SEQ ID NO: 2031 - protein, 14 aa, Artificial Sequence
  Description of Artificial Sequence: Synthetic peptide
  N-term Acetic Acid
  MOD_RES (1)..(1): (R)-2-allylpyrrolidine-2-carboxylic acid
  MOD_RES (3)..(3): (S)-2-amino-4,4-dimethylpentanoic acid
  MOD_RES (4)..(4): 2-amino-2-(pent-4-en-1-yl)hept-6-enoic acid
  MOD_RES (6)..(6): (S)-3-(2-amino-2-carboxyethyl)benzoic acid
  MOD_RES (11)..(11): 4-amino-1-((hex-5-en-1-yloxy)carbonyl)piperidine-4-carboxylic acid
  MOD_RES (12)..(12): (S)-2-amino-3-(2-(trifluoromethyl)phenyl)propanoic acid
  MOD_RES (13)..(13): (S)-2-amino-3-(benzo[b]thiophen-3-yl)propanoic acid
  C-term amino
XDXXDXQAFLXFXA

SEQ ID NO: 2032 - protein, 14 aa, Artificial Sequence
  Description of Artificial Sequence: Synthetic peptide
  N-term Acetic Acid
  MOD_RES (1)..(1): (R)-2-allylpyrrolidine-2-carboxylic acid
  MOD_RES (3)..(3): (S)-2-amino-4,4-dimethylpentanoic acid
  MOD_RES (4)..(4): 2-amino-2-(pent-4-en-1-yl)hept-6-enoic acid
  MOD_RES (6)..(6): (S)-3-(2-amino-2-carboxyethyl)benzoic acid
  MOD_RES (11)..(11): 4-amino-1-((pent-4-en-1-yloxy)carbonyl)piperidine-4- carboxylic acid
  MOD_RES (12)..(12): (S)-2-amino-3-(thiophen-3-yl)propanoic acid
  MOD_RES (13)..(13): (S)-2-amino-3-(benzo[b]thiophen-3-yl)propanoic acid
  C-term amino
XDXXDXAAFLXXXQ

SEQ ID NO: 2033 - protein, 14 aa, Artificial Sequence
  Description of Artificial Sequence: Synthetic peptide
  N-term Acetic Acid
  MOD_RES (1)..(1): (R)-2-allylpyrrolidine-2-carboxylic acid
  MOD_RES (3)..(3): (S)-2-amino-4,4-dimethylpentanoic acid
  MOD_RES (4)..(4): 2-amino-2-(pent-4-en-1-yl)hept-6-enoic acid
  MOD_RES (6)..(6): (S)-3-(2-amino-2-carboxyethyl)benzoic acid
  MOD_RES (11)..(11): 4-amino-1-((hex-5-en-1-yloxy)carbonyl)piperidine-4-carboxylic acid
  MOD_RES (12)..(12): (S)-2-amino-3-(thiophen-3-yl)propanoic acid
  MOD_RES (13)..(13): (S)-2-amino-3-(benzo[b]thiophen-3-yl)propanoic acid
  C-term amino
XDXXDXAAFLXXXQ

SEQ ID NO: 2034 - protein, 14 aa, Artificial Sequence
  Description of Artificial Sequence: Synthetic peptide
  N-term Acetic Acid
  MOD_RES (1)..(1): (R)-2-allylpyrrolidine-2-carboxylic acid
  MOD_RES (3)..(3): (S)-2-amino-4,4-dimethylpentanoic acid
  MOD_RES (4)..(4): 2-amino-2-(pent-4-en-1-yl)hept-6-enoic acid
  MOD_RES (6)..(6): (S)-3-(2-amino-2-carboxyethyl)benzoic acid
  MOD_RES (11)..(11): 4-amino-1-((but-3-en-1-yloxy)carbonyl)piperidine-4-carboxylic acid
  MOD_RES (12)..(12): (S)-2-amino-3-(thiophen-3-yl)propanoic acid
  MOD_RES (13)..(13): (S)-2-amino-3-(benzo[b]thiophen-3-yl)propanoic acid
  C-term amino
XDXXDXQAFLXXXA

SEQ ID NO: 2035 - protein, 14 aa, Artificial Sequence
  Description of Artificial Sequence: Synthetic peptide
  N-term Acetic Acid
  MOD_RES (1)..(1): (R)-2-allylpyrrolidine-2-carboxylic acid
  MOD_RES (3)..(3): (S)-2-amino-4,4-dimethylpentanoic acid
  MOD_RES (4)..(4): 2-amino-2-(pent-4-en-1-yl)hept-6-enoic acid
  MOD_RES (6)..(6): (S)-3-(2-amino-2-carboxyethyl)benzoic acid
  MOD_RES (11)..(11): 4-amino-1-((pent-4-en-1-yloxy)carbonyl)piperidine-4- carboxylic acid
  MOD_RES (12)..(12): (S)-2-amino-3-(thiophen-3-yl)propanoic acid
  MOD_RES (13)..(13): (S)-2-amino-3-(benzo[b]thiophen-3-yl)propanoic acid
  C-term amino
XDXXDXQAFLXXXA

SEQ ID NO: 2036 - protein, 14 aa, Artificial Sequence
  Description of Artificial Sequence: Synthetic peptide
  N-term hex-5-enoic acid
  MOD_RES (1)..(1): (S)-2-methylpyrrolidine-2-carboxylic acid
  MOD_RES (3)..(3): 2-amino-2-(pent-4-en-1-yl)hept-6-enoic acid
  MOD_RES (10)..(10): (S)-3-amino-1-((pent-4-en-1-yloxy)carbonyl)pyrrolidine-3- carboxylic acid
  MOD_RES (12)..(12): (S)-2-amino-3-(thiophen-3-yl)propanoic acid
  MOD_RES (13)..(13): (S)-2-amino-3-(benzo[b]thiophen-3-yl)propanoic acid
  C-term amino
XDXADDAAFXLXXQ

SEQ ID NO: 2037 - protein, 14 aa, Artificial Sequence
  Description of Artificial Sequence: Synthetic peptide
  N-term pent-4-enoic acid
  MOD_RES (1)..(1): (S)-2-methylpyrrolidine-2-carboxylic acid
  MOD_RES (3)..(3): 2-amino-2-(pent-4-en-1-yl)hept-6-enoic acid
  MOD_RES (10)..(10): (S)-3-amino-1-((pent-4-en-1-yloxy)carbonyl)pyrrolidine-3- carboxylic acid
  MOD_RES (12)..(12): (S)-2-amino-3-(thiophen-3-yl)propanoic acid
  MOD_RES (13)..(13): (S)-2-amino-3-(benzo[b]thiophen-3-yl)propanoic acid
  C-term amino
XDXADDAAFXLXXQ

SEQ ID NO: 2038 - protein, 14 aa, Artificial Sequence
  Description of Artificial Sequence: Synthetic peptide
  N-term hex-5-enoic acid
  MOD_RES (1)..(1): (S)-2-methylpyrrolidine-2-carboxylic acid
  MOD_RES (3)..(3): 2-amino-2-(pent-4-en-1-yl)hept-6-enoic acid
  MOD_RES (6)..(6): (S)-3-(2-amino-2-carboxyethyl)benzoic acid
  MOD_RES (10)..(10): (S)-3-amino-1-((pent-4-en-1-yloxy)carbonyl)pyrrolidine-3- carboxylic acid
  MOD_RES (12)..(12): (S)-2-amino-3-(thiophen-3-yl)propanoic acid
  MOD_RES (13)..(13): (S)-2-amino-3-(benzo[b]thiophen-3-yl)propanoic acid
  C-term amino
XDXADXAAFXLXXQ

SEQ ID NO: 2039 - protein, 14 aa, Artificial Sequence
  Description of Artificial Sequence: Synthetic peptide
  N-term pent-4-enoic acid
  MOD_RES (1)..(1): (S)-2-methylpyrrolidine-2-carboxylic acid
  MOD_RES (3)..(3): 2-amino-2-(pent-4-en-1-yl)hept-6-enoic acid
  MOD_RES (6)..(6): (S)-3-(2-amino-2-carboxyethyl)benzoic acid
  MOD_RES (10)..(10): (S)-3-amino-1-((pent-4-en-1-yloxy)carbonyl)pyrrolidine-3- carboxylic acid
  MOD_RES (12)..(12): (S)-2-amino-3-(thiophen-3-yl)propanoic acid
  MOD_RES (13)..(13): (S)-2-amino-3-(benzo[b]thiophen-3-yl)propanoic acid
  C-term amino
XDXADXAAFXLXXQ

SEQ ID NO: 2040 - protein, 14 aa, Artificial Sequence
  Description of Artificial Sequence: Synthetic peptide
  N-term 2-allylbenzoic acid
  MOD_RES (1)..(1): (S)-2-methylpyrrolidine-2-carboxylic acid
  MOD_RES (3)..(3): 2-amino-2-(pent-4-en-1-yl)hept-6-enoic acid
  MOD_RES (10)..(10): (S)-3-amino-1-((pent-4-en-1-yloxy)carbonyl)pyrrolidine-3- carboxylic acid
  MOD_RES (12)..(12): (S)-2-amino-3-(thiophen-3-yl)propanoic acid
  MOD_RES (13)..(13): (S)-2-amino-3-(benzo[b]thiophen-3-yl)propanoic acid
  C-term amino
XDXADDAAFXLXXQ

SEQ ID NO: 2041 - protein, 14 aa, Artificial Sequence
  Description of Artificial Sequence: Synthetic peptide
  N-term 2-allylbenzoic acid
  MOD_RES (1)..(1): (S)-2-methylpyrrolidine-2-carboxylic acid
  MOD_RES (3)..(3): 2-amino-2-(pent-4-en-1-yl)hept-6-enoic acid
  MOD_RES (6)..(6): (S)-3-(2-amino-2-carboxyethyl)benzoic acid
  MOD_RES (10)..(10): (S)-3-amino-1-((pent-4-en-1-yloxy)carbonyl)pyrrolidine-3- carboxylic acid
  MOD_RES (12)..(12): (S)-2-amino-3-(thiophen-3-yl)propanoic acid
  MOD_RES (13)..(13): (S)-2-amino-3-(benzo[b]thiophen-3-yl)propanoic acid
  C-term amino
XDXADXAAFXLXXQ

SEQ ID NO: 2042 - protein, 14 aa, Artificial Sequence
  Description of Artificial Sequence: Synthetic peptide
  N-term but-3-enoic acid
  MOD_RES (1)..(1): (S)-2-methylpyrrolidine-2-carboxylic acid
  MOD_RES (3)..(3): 2-amino-2-(pent-4-en-1-yl)hept-6-enoic acid
  MOD_RES (10)..(10): (S)-3-amino-1-((pent-4-en-1-yloxy)carbonyl)pyrrolidine-3- carboxylic acid
  MOD_RES (12)..(12): (S)-2-amino-3-(thiophen-3-yl)propanoic acid
  MOD_RES (13)..(13): (S)-2-amino-3-(benzo[b]thiophen-3-yl)propanoic acid
  C-term amino
XDXADDAAFXLXXQ

SEQ ID NO: 2043 - protein, 14 aa, Artificial Sequence
  Description of Artificial Sequence: Synthetic peptide
  N-term Acetic Acid
  MOD_RES (1)..(1): (R)-2-allylpyrrolidine-2-carboxylic acid
  MOD_RES (3)..(3): (S)-2-amino-4,4-dimethylpentanoic acid
  MOD_RES (4)..(4): 2-amino-2-(pent-4-en-1-yl)hept-6-enoic acid
  MOD_RES (6)..(6): (S)-3-(2-amino-2-carboxyethyl)benzoic acid
  MOD_RES (11)..(11): 3-amino-1-((pent-4-en-1-yloxy)carbonyl)azetidine-3-carboxylic acid
  MOD_RES (12)..(12): (S)-2-amino-3-(2-(trifluoromethyl)phenyl)propanoic acid
  MOD_RES (13)..(13): (S)-2-amino-3-(benzo[b]thiophen-3-yl)propanoic acid
  C-term amino
XDXXDXAAFLXFXQ

SEQ ID NO: 2044 - protein, 14 aa, Artificial Sequence
  Description of Artificial Sequence: Synthetic peptide
  N-term Acetic Acid
  MOD_RES (1)..(1): (R)-2-allylpyrrolidine-2-carboxylic acid
  MOD_RES (3)..(3): (S)-2-amino-4,4-dimethylpentanoic acid
  MOD_RES (4)..(4): 2-amino-2-(pent-4-en-1-yl)hept-6-enoic acid
  MOD_RES (6)..(6): (S)-3-(2-amino-2-carboxyethyl)benzoic acid
  MOD_RES (11)..(11): 3-amino-1-((hex-5-en-1-yloxy)carbonyl)azetidine-3-carboxylic acid
  MOD_RES (12)..(12): (S)-2-amino-3-(2-(trifluoromethyl)phenyl)propanoic acid
  MOD_RES (13)..(13): (S)-2-amino-3-(benzo[b]thiophen-3-yl)propanoic acid
  C-term amino
XDXXDXAAFLXFXQ

SEQ ID NO: 2045 - protein, 14 aa, Artificial Sequence
  Description of Artificial Sequence: Synthetic peptide
  N-term Acetic Acid
  MOD_RES (1)..(1): (R)-2-allylpyrrolidine-2-carboxylic acid
  MOD_RES (3)..(3): (S)-2-amino-4,4-dimethylpentanoic acid
  MOD_RES (4)..(4): 2-amino-2-(pent-4-en-1-yl)hept-6-enoic acid
  MOD_RES (6)..(6): (S)-3-(2-amino-2-carboxyethyl)benzoic acid
  MOD_RES (11)..(11): 3-amino-1-((hex-5-en-1-yloxy)carbonyl)azetidine-3-carboxylic acid
  MOD_RES (12)..(12): (S)-2-amino-3-(thiophen-3-yl)propanoic acid
  MOD_RES (13)..(13): (S)-2-amino-3-(benzo[b]thiophen-3-yl)propanoic acid
  C-term amino
XDXXDXAAFLXXXQ

SEQ ID NO: 2046 - protein, 14 aa, Artificial Sequence
  Description of Artificial Sequence: Synthetic peptide
  N-term Acetic Acid
  MOD_RES (1)..(1): (R)-2-allylpyrrolidine-2-carboxylic acid
  MOD_RES (3)..(3): (S)-2-amino-4,4-dimethylpentanoic acid
  MOD_RES (4)..(4): 2-amino-2-(pent-4-en-1-yl)hept-6-enoic acid
  MOD_RES (6)..(6): (S)-3-(2-amino-2-carboxyethyl)benzoic acid
  MOD_RES (7)..(7): 2-amino-2-methylpropanoic acid
  MOD_RES (11)..(11): 3-amino-1-((pent-4-en-1-yloxy)carbonyl)azetidine-3-carboxylic acid
  MOD_RES (12)..(12): (S)-2-amino-3-(2-(trifluoromethyl)phenyl)propanoic acid
  MOD_RES (13)..(13): (S)-2-amino-3-(benzo[b]thiophen-3-yl)propanoic acid
  C-term amino
XDXXDXXAFLXFXQ

SEQ ID NO: 2047 - protein, 14 aa, Artificial Sequence
  Description of Artificial Sequence: Synthetic peptide
  N-term Acetic Acid
  MOD_RES (1)..(1): (R)-2-allylpyrrolidine-2-carboxylic acid
  MOD_RES (3)..(3): (S)-2-amino-4,4-dimethylpentanoic acid
  MOD_RES (4)..(4): 2-amino-2-(pent-4-en-1-yl)hept-6-enoic acid
  MOD_RES (6)..(6): (S)-3-(2-amino-2-carboxyethyl)benzoic acid
  MOD_RES (7)..(7): 2-amino-2-methylpropanoic acid
  MOD_RES (11)..(11): 3-amino-1-((hex-5-en-1-yloxy)carbonyl)azetidine-3-carboxylic acid
  MOD_RES (12)..(12): (S)-2-amino-3-(2-(trifluoromethyl)phenyl)propanoic acid
  MOD_RES (13)..(13): (S)-2-amino-3-(benzo[b]thiophen-3-yl)propanoic acid
  C-term amino
XDXXDXXAFLXFXQ

SEQ ID NO: 2048 - protein, 14 aa, Artificial Sequence
  Description of Artificial Sequence: Synthetic peptide
  N-term Acetic Acid
  MOD_RES (1)..(1): (R)-2-allylpyrrolidine-2-carboxylic acid
  MOD_RES (3)..(3): (S)-2-amino-4,4-dimethylpentanoic acid
  MOD_RES (4)..(4): 2-amino-2-(pent-4-en-1-yl)hept-6-enoic acid
  MOD_RES (6)..(6): (S)-3-(2-amino-2-carboxyethyl)benzoic acid
  MOD_RES (7)..(7): 2-amino-2-methylpropanoic acid
  MOD_RES (11)..(11): 3-amino-1-((pent-4-en-1-yloxy)carbonyl)azetidine-3-carboxylic acid
  MOD_RES (12)..(12): (S)-2-amino-3-(thiophen-3-yl)propanoic acid
  MOD_RES (13)..(13): (S)-2-amino-3-(benzo[b]thiophen-3-yl)propanoic acid
  C-term amino
XDXXDXXAFLXXXQ

SEQ ID NO: 2049 - protein, 14 aa, Artificial Sequence
  Description of Artificial Sequence: Synthetic peptide
  N-term Acetic Acid
  MOD_RES (1)..(1): (R)-2-allylpyrrolidine-2-carboxylic acid
  MOD_RES (3)..(3): (S)-2-amino-4,4-dimethylpentanoic acid
  MOD_RES (4)..(4): 2-amino-2-(pent-4-en-1-yl)hept-6-enoic acid
  MOD_RES (6)..(6): (S)-3-(2-amino-2-carboxyethyl)benzoic acid
  MOD_RES (7)..(7): 2-amino-2-methylpropanoic acid
  MOD_RES (11)..(11): 3-amino-1-((hex-5-en-1-yloxy)carbonyl)azetidine-3-carboxylic acid
  MOD_RES (12)..(12): (S)-2-amino-3-(thiophen-3-yl)propanoic acid
  MOD_RES (13)..(13): (S)-2-amino-3-(benzo[b]thiophen-3-yl)propanoic acid
  C-term amino
XDXXDXXAFLXXXQ
